United States Patent Application Publication US 2025/0327125 A1 - sequence listing, part 2

SEQ ID NO: 29648 - DNA, 20 bp, synthetic construct
  source 1..20: mol_type = other DNA
tggagcatggacaggtgctg

SEQ ID NO: 29649 - DNA, 20 bp, synthetic construct
  source 1..20: mol_type = other DNA
ctgctgagtgtaatgtacgt

SEQ ID NO: 29650 - DNA, 20 bp, synthetic construct
  source 1..20: mol_type = other DNA
acactgactatggacagaaa

SEQ ID NO: 29651 - DNA, 20 bp, synthetic construct
  source 1..20: mol_type = other DNA
ttgcaagttggagcatggac

SEQ ID NO: 29652 - DNA, 20 bp, synthetic construct
  source 1..20: mol_type = other DNA
caaacacgagcggaccagca

SEQ ID NO: 29653 - DNA, 20 bp, synthetic construct
  source 1..20: mol_type = other DNA
agagcagtggtcaccaagtg

SEQ ID NO: 29654 - DNA, 20 bp, synthetic construct
  source 1..20: mol_type = other DNA
acctgaagtgcacagatctg

SEQ ID NO: 29655 - DNA, 20 bp, synthetic construct
  source 1..20: mol_type = other DNA
ctcatgacctcaaacacgag

SEQ ID NO: 29656 - DNA, 20 bp, synthetic construct
  source 1..20: mol_type = other DNA
ggaccagcagggctaatagc

SEQ ID NO: 29657 - DNA, 20 bp, synthetic construct
  source 1..20: mol_type = other DNA
ggactctgagcattgctgac

SEQ ID NO: 29658 - DNA, 20 bp, synthetic construct
  source 1..20: mol_type = other DNA
cagatctgtgcacttcaggt

SEQ ID NO: 29659 - DNA, 20 bp, synthetic construct
  source 1..20: mol_type = other DNA
acagatctggggacattggg

SEQ ID NO: 29660 - DNA, 20 bp, synthetic construct
  source 1..20: mol_type = other DNA
gaattggaagtgctgaggat

SEQ ID NO: 29661 - DNA, 20 bp, synthetic construct
  source 1..20: mol_type = other DNA
ctaggtgatgctgacctgtg

SEQ ID NO: 29662 - DNA, 20 bp, synthetic construct
  source 1..20: mol_type = other DNA
aataacaaaagaaatacccg

SEQ ID NO: 29663 - DNA, 20 bp, synthetic construct
  source 1..20: mol_type = other DNA
tcaggatctgaataatttgg

SEQ ID NO: 29664 - DNA, 20 bp, synthetic construct
  source 1..20: mol_type = other DNA
gcatccaggagcagagctgt

SEQ ID NO: 29665 - DNA, 20 bp, synthetic construct
  source 1..20: mol_type = other DNA
tgtggttgaacaagctctgc

SEQ ID NO: 29666 - DNA, 20 bp, synthetic construct
  source 1..20: mol_type = other DNA
ggatggggtccagcaatctg

SEQ ID NO: 29667 - DNA, 20 bp, synthetic construct
  source 1..20: mol_type = other DNA
ttgggactaaaactataacc

SEQ ID NO: 29668 - DNA, 20 bp, synthetic construct
  source 1..20: mol_type = other DNA
gtatcttggtttcaagcccg

SEQ ID NO: 29669 - DNA, 20 bp, synthetic construct
  source 1..20: mol_type = other DNA
aggtacttacgaggtttgcg

SEQ ID NO: 29670 - DNA, 20 bp, synthetic construct
  source 1..20: mol_type = other DNA
tggaaaagacctattatgag

SEQ ID NO: 29671 - DNA, 20 bp, synthetic construct
  source 1..20: mol_type = other DNA
gatatcaacacccttaaact

SEQ ID NO: 29672 - DNA, 20 bp, synthetic construct
  source 1..20: mol_type = other DNA
gaagtggataccaaaaaatg

SEQ ID NO: 29673 - DNA, 20 bp, synthetic construct
  source 1..20: mol_type = other DNA
atttgccagagctataaacc

SEQ ID NO: 29674 - DNA, 20 bp, synthetic construct
  source 1..20: mol_type = other DNA
tgtgcttggtgctaataacc

SEQ ID NO: 29675 - DNA, 20 bp, synthetic construct
  source 1..20: mol_type = other DNA
gaatgggaggagtataagac

SEQ ID NO: 29676 - DNA, 20 bp, synthetic construct
  source 1..20: mol_type = other DNA
agaactggtaaaacagcctc

SEQ ID NO: 29677 - DNA, 20 bp, synthetic construct
  source 1..20: mol_type = other DNA
aaaacccttacagaaaatct

SEQ ID NO: 29678 - DNA, 20 bp, synthetic construct
  source 1..20: mol_type = other DNA
atatcttgctcacatcccca

SEQ ID NO: 29679 - DNA, 20 bp, synthetic construct
  source 1..20: mol_type = other DNA
ttaaggattctgtcccactg

SEQ ID NO: 29680 - DNA, 20 bp, synthetic construct
  source 1..20: mol_type = other DNA
tgaagtggaaaaacatttgg

SEQ ID NO: 29681 - DNA, 20 bp, synthetic construct
  source 1..20: mol_type = other DNA
ggtatcttcactggaagctc

SEQ ID NO: 29682 - DNA, 20 bp, synthetic construct
  source 1..20: mol_type = other DNA
agcctgtggagtgtagcaag

SEQ ID NO: 29683 - DNA, 20 bp, synthetic construct
  source 1..20: mol_type = other DNA
ggggcttcttcatacgacga

SEQ ID NO: 29684 - DNA, 20 bp, synthetic construct
  source 1..20: mol_type = other DNA
gatggttaaagctgcaactg

SEQ ID NO: 29685 - DNA, 20 bp, synthetic construct
  source 1..20: mol_type = other DNA
caagagcgagatgtgcataa

SEQ ID NO: 29686 - DNA, 20 bp, synthetic construct
  source 1..20: mol_type = other DNA
tggtaacaacgcttgctcca

SEQ ID NO: 29687 - DNA, 20 bp, synthetic construct
  source 1..20: mol_type = other DNA
caggcaagccacaatgtgtg

SEQ ID NO: 29688 - DNA, 20 bp, synthetic construct
  source 1..20: mol_type = other DNA
caacagatgaatccctacga

SEQ ID NO: 29689 - DNA, 20 bp, synthetic construct
  source 1..20: mol_type = other DNA
atatcaatgaaactcacaca

SEQ ID NO: 29690 - DNA, 20 bp, synthetic construct
  source 1..20: mol_type = other DNA
gaagtaattcaactatatgc

SEQ ID NO: 29691 - DNA, 20 bp, synthetic construct
  source 1..20: mol_type = other DNA
cattccgcaaacccaaagac

SEQ ID NO: 29692 - DNA, 20 bp, synthetic construct
  source 1..20: mol_type = other DNA
aaagcctaatgagtcggaaa

SEQ ID NO: 29693 - DNA, 20 bp, synthetic construct
  source 1..20: mol_type = other DNA
tcaatatgggatctatgaac

SEQ ID NO: 29694 - DNA, 20 bp, synthetic construct
  source 1..20: mol_type = other DNA
aaagaagtcttcgaccaatg

SEQ ID NO: 29695 - DNA, 20 bp, synthetic construct
  source 1..20: mol_type = other DNA
aaaatgtgctgaacagcagt

SEQ ID NO: 29696 - DNA, 20 bp, synthetic construct
  source 1..20: mol_type = other DNA
gaaggcacacgttctaggag

SEQ ID NO: 29697 - DNA, 20 bp, synthetic construct
  source 1..20: mol_type = other DNA
ttaatcaggacctcaactcg

SEQ ID NO: 29698 - DNA, 20 bp, synthetic construct
  source 1..20: mol_type = other DNA
tgttcctcgaatgccaacct

SEQ ID NO: 29699 - DNA, 20 bp, synthetic construct
  source 1..20: mol_type = other DNA
gaagctggtcaaggcgacac

SEQ ID NO: 29700 - DNA, 20 bp, synthetic construct
  source 1..20: mol_type = other DNA
gagatcttgagcaaaaaaca

SEQ ID NO: 29701 - DNA, 20 bp, synthetic construct
  source 1..20: mol_type = other DNA
cggattaatgaggtccagca

SEQ ID NO: 29702 - DNA, 20 bp, synthetic construct
  source 1..20: mol_type = other DNA
gactcacgtggaagtcccag

SEQ ID NO: 29703 - DNA, 20 bp, synthetic construct
  source 1..20: mol_type = other DNA
aagaaagccaataaagacct

SEQ ID NO: 29704 - DNA, 20 bp, synthetic construct
  source 1..20: mol_type = other DNA
agaggcccggaccatctgtg

SEQ ID NO: 29705 - DNA, 20 bp, synthetic construct
  source 1..20: mol_type = other DNA
ggagaaagagtccctcatca

SEQ ID NO: 29706 - DNA, 20 bp, synthetic construct
  source 1..20: mol_type = other DNA
ttgccaggaaaaggaaagtg

SEQ ID NO: 29707 - DNA, 20 bp, synthetic construct
  source 1..20: mol_type = other DNA
tggagagaaagtacacctga

SEQ ID NO: 29708 - DNA, 20 bp, synthetic construct
  source 1..20: mol_type = other DNA
atgcagccggaggatcctca

SEQ ID NO: 29709 - DNA, 20 bp, synthetic construct
  source 1..20: mol_type = other DNA
aaggagcagctgctcaagga

SEQ ID NO: 29710 - DNA, 20 bp, synthetic construct
  source 1..20: mol_type = other DNA
tcagctgtgctccctgtgtg

SEQ ID NO: 29711 - DNA, 20 bp, synthetic construct
  source 1..20: mol_type = other DNA
tgaggacgtgtcctgccctg

SEQ ID NO: 29712 - DNA, 20 bp, synthetic construct
  source 1..20: mol_type = other DNA
tcaagatccaaccctatgtg

SEQ ID NO: 29713 - DNA, 20 bp, synthetic construct
  source 1..20: mol_type = other DNA
agagctaaaggtgattagag

SEQ ID NO: 29714 - DNA, 20 bp, synthetic construct
  source 1..20: mol_type = other DNA
gtactataggaccagctgaa

SEQ ID NO: 29715 - DNA, 20 bp, synthetic construct
  source 1..20: mol_type = other DNA
aggaatgtctccccagtgca

SEQ ID NO: 29716 - DNA, 20 bp, synthetic construct
  source 1..20: mol_type = other DNA
caaacagaggaatacacatg

SEQ ID NO: 29717 - DNA, 20 bp, synthetic construct
  source 1..20: mol_type = other DNA
gacaatgctagctagctaag

SEQ ID NO: 29718 - DNA, 20 bp, synthetic construct
  source 1..20: mol_type = other DNA
gaagatcgaactttggagtg

SEQ ID NO: 29719 - DNA, 20 bp, synthetic construct
  source 1..20: mol_type = other DNA
gtcagttacatggatacatg

SEQ ID NO: 29720 - DNA, 20 bp, synthetic construct
  source 1..20: mol_type = other DNA
agagcctctgagctcaacgg

SEQ ID NO: 29721 - DNA, 20 bp, synthetic construct
  source 1..20: mol_type = other DNA
tagtgtcaagtggaccaatg

SEQ ID NO: 29722 - DNA, 20 bp, synthetic construct
  source 1..20: mol_type = other DNA
gtctatctgggcagtaacca

SEQ ID NO: 29723 - DNA, 20 bp, synthetic construct
  source 1..20: mol_type = other DNA
ttgccgaagtgccatataca

SEQ ID NO: 29724 - DNA, 20 bp, synthetic construct
  source 1..20: mol_type = other DNA
aatccttgagaataaaaaag

SEQ ID NO: 29725 - DNA, 20 bp, synthetic construct
  source 1..20: mol_type = other DNA
gagatttaagcaggcatgcg

SEQ ID NO: 29726 - DNA, 20 bp, synthetic construct
  source 1..20: mol_type = other DNA
gtgcatacttaatttaggaa

SEQ ID NO: 29727 - DNA, 20 bp, synthetic construct
  source 1..20: mol_type = other DNA
aatgcaccggttgtcagacg

SEQ ID NO: 29728 - DNA, 20 bp, synthetic construct
  source 1..20: mol_type = other DNA
acagtactggcatgaaattg

SEQ ID NO: 29729 - DNA, 20 bp, synthetic construct
  source 1..20: mol_type = other DNA
gataagcagctattgacccg

SEQ ID NO: 29730 - DNA, 20 bp, synthetic construct
  source 1..20: mol_type = other DNA
aggcagcccatccaaacatg

SEQ ID NO: 29731 - DNA, 20 bp, synthetic construct
  source 1..20: mol_type = other DNA
gctgtgctaacgtatgctcc

SEQ ID NO: 29732 - DNA, 20 bp, synthetic construct
  source 1..20: mol_type = other DNA
tacagggcccttatacacag

SEQ ID NO: 29733 - DNA, 20 bp, synthetic construct
  source 1..20: mol_type = other DNA
aaatgaacctattatcacca

SEQ ID NO: 29734 - DNA, 20 bp, synthetic construct
  source 1..20: mol_type = other DNA
ttatagctgtcacaagatga

SEQ ID NO: 29735 - DNA, 20 bp, synthetic construct
  source 1..20: mol_type = other DNA
gacattaggacccggagcgg

SEQ ID NO: 29736 - DNA, 20 bp, synthetic construct
  source 1..20: mol_type = other DNA
acttacctctataataaaag

SEQ ID NO: 29737 - DNA, 20 bp, synthetic construct
  source 1..20: mol_type = other DNA
tactagggcagcatctaaca

SEQ ID NO: 29738 - DNA, 20 bp, synthetic construct
  source 1..20: mol_type = other DNA
ctactcaaagtactgtgtcg

SEQ ID NO: 29739 - DNA, 20 bp, synthetic construct
  source 1..20: mol_type = other DNA
agataaagtggtgcatgctc

SEQ ID NO: 29740 - DNA, 20 bp, synthetic construct
  source 1..20: mol_type = other DNA
gactaacagactgtaaagtc

SEQ ID NO: 29741 - DNA, 20 bp, synthetic construct
  source 1..20: mol_type = other DNA
ttaattagcactctatggtt

SEQ ID NO: 29742 - DNA, 20 bp, synthetic construct
  source 1..20: mol_type = other DNA
ctagtaggcaatattgtacg

SEQ ID NO: 29743 - DNA, 20 bp, synthetic construct
  source 1..20: mol_type = other DNA
tgtattggatatataattgg

SEQ ID NO: 29744 - DNA, 20 bp, synthetic construct
  source 1..20: mol_type = other DNA
tataggaaatacccaaaggc

SEQ ID NO: 29745 - DNA, 20 bp, synthetic construct
  source 1..20: mol_type = other DNA
ggataaccaacatcctatgt

SEQ ID NO: 29746 - DNA, 20 bp, synthetic construct
  source 1..20: mol_type = other DNA
tgaatccaactagagatgtt

SEQ ID NO: 29747 - DNA, 20 bp, synthetic construct
  source 1..20: mol_type = other DNA
aacaacatacccttcataag

SEQ ID NO: 29748 - DNA, 20 bp, synthetic construct
  source 1..20: mol_type = other DNA
ctcgttgggtcggtgcatgg

SEQ ID NO: 29749 - DNA, 20 bp, synthetic construct
  source 1..20: mol_type = other DNA
atagagaagatactcaagta

SEQ ID NO: 29750 - DNA, 20 bp, synthetic construct
  source 1..20: mol_type = other DNA
caacctgatggatcctgcgt

SEQ ID NO: 29751 - DNA, 20 bp, synthetic construct
  source 1..20: mol_type = other DNA
ggagtacttactggttcatg

SEQ ID NO: 29752 - DNA, 20 bp, synthetic construct
  source 1..20: mol_type = other DNA
gacactggatttgtgaacac

SEQ ID NO: 29753 - DNA, 20 bp, synthetic construct
  source 1..20: mol_type = other DNA
aggaagttaaatcattaatg

SEQ ID NO: 29754 - DNA, 20 bp, synthetic construct
  source 1..20: mol_type = other DNA
aatgattggcattggatgtg

SEQ ID NO: 29755 - DNA, 20 bp, synthetic construct
  source 1..20: mol_type = other DNA
ccgacccaacgagtgtcagt

SEQ ID NO: 29756 - DNA, 20 bp, synthetic construct
  source 1..20: mol_type = other DNA
cccaacacacttccaaagga

SEQ ID NO: 29757 - DNA, 20 bp, synthetic construct
  source 1..20: mol_type = other DNA
ctagtaagtcttcccgagag

SEQ ID NO: 29758 - DNA, 20 bp, synthetic construct
  source 1..20: mol_type = other DNA
gtactatagacattaggatc

SEQ ID NO: 29759 - DNA, 20 bp, synthetic construct
  source 1..20: mol_type = other DNA
tgggtacacacatcagcctc

SEQ ID NO: 29760 - DNA, 20 bp, synthetic construct
  source 1..20: mol_type = other DNA
gattcaccatgagtcatcaa

SEQ ID NO: 29761 - DNA, 20 bp, synthetic construct
  source 1..20: mol_type = other DNA
agttccatagaagattgatt

SEQ ID NO: 29762 - DNA, 20 bp, synthetic construct
  source 1..20: mol_type = other DNA
taactactctacttgtcacc

SEQ ID NO: 29763 - DNA, 20 bp, synthetic construct
  source 1..20: mol_type = other DNA
gctcttgagagataaatgta

SEQ ID NO: 29764 - DNA, 20 bp, synthetic construct
  source 1..20: mol_type = other DNA
aaggcttgaaagattggtga

SEQ ID NO: 29765 - DNA, 20 bp, synthetic construct
  source 1..20: mol_type = other DNA
accccctgcagtcctaactt

SEQ ID NO: 29766 - DNA, 20 bp, synthetic construct
  source 1..20: mol_type = other DNA
gctgtatcatagagtgaatg

SEQ ID NO: 29767 - DNA, 20 bp, synthetic construct
  source 1..20: mol_type = other DNA
aggtaaatctgacaaatctg

SEQ ID NO: 29768 - DNA, 20 bp, synthetic construct
  source 1..20: mol_type = other DNA
ggatttgaacaacttatgta

SEQ ID NO: 29769 - DNA, 20 bp, synthetic construct
  source 1..20: mol_type = other DNA
atgctaacatcttacctgag

SEQ ID NO: 29770 - DNA, 20 bp, synthetic construct
  source 1..20: mol_type = other DNA
cctgcacaatggaaacactt

SEQ ID NO: 29771 - DNA, 20 bp, synthetic construct
  source 1..20: mol_type = other DNA
agaaaggagacagttgctgt

SEQ ID NO: 29772 - DNA, 20 bp, synthetic construct
  source 1..20: mol_type = other DNA
agccaagcaaaccatgaccc

SEQ ID NO: 29773 - DNA, 20 bp, synthetic construct
  source 1..20: mol_type = other DNA
ataccttaggggtaaacatg

SEQ ID NO: 29774 - DNA, 20 bp, synthetic construct
  source 1..20: mol_type = other DNA
aattacataagccctaaact

SEQ ID NO: 29775 - DNA, 20 bp, synthetic construct
  source 1..20: mol_type = other DNA
acctacagaaaatccaactt

SEQ ID NO: 29776 - DNA, 20 bp, synthetic construct
  source 1..20: mol_type = other DNA
ggcctagattgaccagcatg

SEQ ID NO: 29777 - DNA, 20 bp, synthetic construct
  source 1..20: mol_type = other DNA
aggacactgatcccaaggca

SEQ ID NO: 29778 - DNA, 20 bp, synthetic construct
  source 1..20: mol_type = other DNA
agaattcggcgaggcagcat

SEQ ID NO: 29779 - DNA, 20 bp, synthetic construct
  source 1..20: mol_type = other DNA
gtttgcttggctatgatcaa

SEQ ID NO: 29780 - DNA, 20 bp, synthetic construct
  source 1..20: mol_type = other DNA
ttaaaaggaatgctctgatg

SEQ ID NO: 29781 - DNA, 20 bp, synthetic construct
  source 1..20: mol_type = other DNA
accaccaaatcccagaccta

SEQ ID NO: 29782 - DNA, 20 bp, synthetic construct
  source 1..20: mol_type = other DNA
tcgaagatgaaagaccagct

SEQ ID NO: 29783 - DNA, 20 bp, synthetic construct
  source 1..20: mol_type = other DNA
gttgaaaggttgatatgatg

SEQ ID NO: 29784 - DNA, 20 bp, synthetic construct
  source 1..20: mol_type = other DNA
caccacctattactggtaca

SEQ ID NO: 29785 - DNA, 20 bp, synthetic construct
  source 1..20: mol_type = other DNA
atacctatgtcagaagaatg

SEQ ID NO: 29786 - DNA, 20 bp, synthetic construct
  source 1..20: mol_type = other DNA
ctgtaggtttaggaaatgtg

SEQ ID NO: 29787 - DNA, 20 bp, synthetic construct
  source 1..20: mol_type = other DNA
gctctctggacttacactcg

SEQ ID NO: 29788 - DNA, 20 bp, synthetic construct
  source 1..20: mol_type = other DNA
tcacatggagagttgaaccc

SEQ ID NO: 29789 - DNA, 20 bp, synthetic construct
  source 1..20: mol_type = other DNA
gcagatgcagataagaaacg

SEQ ID NO: 29790 - DNA, 20 bp, synthetic construct
  source 1..20: mol_type = other DNA
ctaactgcaactcatgtatg

SEQ ID NO: 29791 - DNA, 20 bp, synthetic construct
  source 1..20: mol_type = other DNA
caagagctggcgaacaacct

SEQ ID NO: 29792 - DNA, 20 bp, synthetic construct
  source 1..20: mol_type = other DNA
tactggcatcgcactggaag

SEQ ID NO: 29793 - DNA, 20 bp, synthetic construct
  source 1..20: mol_type = other DNA
ccatgtgagaataccaagct

SEQ ID NO: 29794 - DNA, 20 bp, synthetic construct
  source 1..20: mol_type = other DNA
tttagccctcaggaaacaag

SEQ ID NO: 29795 - DNA, 20 bp, synthetic construct
  source 1..20: mol_type = other DNA
gattacttgaagccaagagc

SEQ ID NO: 29796 - DNA, 20 bp, synthetic construct
  source 1..20: mol_type = other DNA
ccattcaggctctaatgcag

SEQ ID NO: 29797 - DNA, 20 bp, synthetic construct
  source 1..20: mol_type = other DNA
atcctgttggtgccacctga

SEQ ID NO: 29798 - DNA, 20 bp, synthetic construct
  source 1..20: mol_type = other DNA
cttaagaatacatctgaccc

SEQ ID NO: 29799 - DNA, 20 bp, synthetic construct
  source 1..20: mol_type = other DNA
cctgaaggcagagatggctg

SEQ ID NO: 29800 - DNA, 20 bp, synthetic construct
  source 1..20: mol_type = other DNA
ccaagtagcctgggaaaaag

SEQ ID NO: 29801 - DNA, 20 bp, synthetic construct
  source 1..20: mol_type = other DNA
aggtcagagaatatcagagc

SEQ ID NO: 29802 - DNA, 20 bp, synthetic construct
  source 1..20: mol_type = other DNA
tagaactgtggcaatggacg

SEQ ID NO: 29803 - DNA, 20 bp, synthetic construct
  source 1..20: mol_type = other DNA
actgtacctggttactacca

SEQ ID NO: 29804 - DNA, 20 bp, synthetic construct
  source 1..20: mol_type = other DNA
gtacacaaagctccagcgtc

SEQ ID NO: 29805 - DNA, 20 bp, synthetic construct
  source 1..20: mol_type = other DNA
tcttacttgaagtgtcatag

SEQ ID NO: 29806 - DNA, 20 bp, synthetic construct
  source 1..20: mol_type = other DNA
ggctgacactcctctaactg

SEQ ID NO: 29807 - DNA, 20 bp, synthetic construct
  source 1..20: mol_type = other DNA
acactgtcaaagttatggta

SEQ ID NO: 29808 - DNA, 20 bp, synthetic construct
  source 1..20: mol_type = other DNA
atagatgctgtagttaacaa

SEQ ID NO: 29809 - DNA, 20 bp, synthetic construct
  source 1..20: mol_type = other DNA
atagctgatgtcataggttg

SEQ ID NO: 29810 - DNA, 20 bp, synthetic construct
  source 1..20: mol_type = other DNA
acatctatgtatttggtaag

SEQ ID NO: 29811 - DNA, 20 bp, synthetic construct
  source 1..20: mol_type = other DNA
gctctttgtaaccataggct

SEQ ID NO: 29812 - DNA, 20 bp, synthetic construct
  source 1..20: mol_type = other DNA
ccttcagcaagctctaaaag

SEQ ID NO: 29813 - DNA, 20 bp, synthetic construct
  source 1..20: mol_type = other DNA
agtgatgagtccataggcaa

SEQ ID NO: 29814 - DNA, 20 bp, synthetic construct
  source 1..20: mol_type = other DNA
aggagtactagataaattag

SEQ ID NO: 29815 - DNA, 20 bp, synthetic construct
  source 1..20: mol_type = other DNA
ggaagatccaatagccaaag

SEQ ID NO: 29816 - DNA, 20 bp, synthetic construct
  source 1..20: mol_type = other DNA
taatggaatagtaactctct

SEQ ID NO: 29817 - DNA, 20 bp, synthetic construct
  source 1..20: mol_type = other DNA
cactcaccggatctcatgcg

SEQ ID NO: 29818 - DNA, 20 bp, synthetic construct
  source 1..20: mol_type = other DNA
tcgctgtaggccgtgacggt

SEQ ID NO: 29819 - DNA, 20 bp, synthetic construct
  source 1..20: mol_type = other DNA
tgccacgatggtctcgctgt

SEQ ID NO: 29820 - DNA, 20 bp, synthetic construct
  source 1..20: mol_type = other DNA
tggcagcacccaactgcacg

SEQ ID NO: 29821 - DNA, 20 bp, synthetic construct
  source 1..20: mol_type = other DNA
atgctctccccaaagaacac

SEQ ID NO: 29822 - DNA, 20 bp, synthetic construct
  source 1..20: mol_type = other DNA
gtcctggaaatgcttctccg

SEQ ID NO: 29823 - DNA, 20 bp, synthetic construct
  source 1..20: mol_type = other DNA
ggcctacagcgagaccatcg

SEQ ID NO: 29824 - DNA, 20 bp, synthetic construct
  source 1..20: mol_type = other DNA
cggaacccacgcatgagatc

SEQ ID NO: 29825 - DNA, 20 bp, synthetic construct
  source 1..20: mol_type = other DNA
taggccgtgacggtgggtac

SEQ ID NO: 29826 - DNA, 20 bp, synthetic construct
  source 1..20: mol_type = other DNA
cctttccagctgcaactctg

SEQ ID NO: 29827 - DNA, 20 bp, synthetic construct
  source 1..20: mol_type = other DNA
gcgcatagaagaccttgtcc

SEQ ID NO: 29828 - DNA, 20 bp, synthetic construct
  source 1..20: mol_type = other DNA
ggagagcatcaaggtgaacc

SEQ ID NO: 29829 - DNA, 20 bp, synthetic construct
  source 1..20: mol_type = other DNA
gttctttggggagagcatca

SEQ ID NO: 29830 - DNA, 20 bp, synthetic construct
  source 1..20: mol_type = other DNA
ctaccgcagccagctgaccc

SEQ ID NO: 29831 - DNA, 20 bp, synthetic construct
  source 1..20: mol_type = other DNA
atgcttggggaagatgatgg

SEQ ID NO: 29832 - DNA, 20 bp, synthetic construct
  source 1..20: mol_type = other DNA
gaagtaacataaataagggt

SEQ ID NO: 29833 - DNA, 20 bp, synthetic construct
  source 1..20: mol_type = other DNA
acgcacgcgcaagaagcaag

SEQ ID NO: 29834 - DNA, 20 bp, synthetic construct
  source 1..20: mol_type = other DNA
aaaaagacagtaaacaatcg

SEQ ID NO: 29835 - DNA, 20 bp, synthetic construct
  source 1..20: mol_type = other DNA
gtaacgtaaaacttctggac

SEQ ID NO: 29836 - DNA, 20 bp, synthetic construct
  source 1..20: mol_type = other DNA
gttatagaacaggataaggc

SEQ ID NO: 29837 - DNA, 20 bp, synthetic construct
  source 1..20: mol_type = other DNA
aacgtagactaaatgcctgt

SEQ ID NO: 29838 - DNA, 20 bp, synthetic construct
  source 1..20: mol_type = other DNA
gaatacagtatagataaaga

SEQ ID NO: 29839 - DNA, 20 bp, synthetic construct
  source 1..20: mol_type = other DNA
aagtgaacttagaggttgtg

SEQ ID NO: 29840 - DNA, 20 bp, synthetic construct
  source 1..20: mol_type = other DNA
gagaaatgttacgaacacat

SEQ ID NO: 29841 - DNA, 20 bp, synthetic construct
  source 1..20: mol_type = other DNA
cgataacccctgtaaagcgc

SEQ ID NO: 29842 - DNA, 20 bp, synthetic construct
  source 1..20: mol_type = other DNA
gatgattctgcgcatgtgcc

SEQ ID NO: 29843 - DNA, 20 bp, synthetic construct
  source 1..20: mol_type = other DNA
ttaacaattctgcctaaagg

SEQ ID NO: 29844 - DNA, 20 bp, synthetic construct
  source 1..20: mol_type = other DNA
agctctacaagccggcaggg

SEQ ID NO: 29845 - DNA, 20 bp, synthetic construct
  source 1..20: mol_type = other DNA
agtgtctaaactccaaacaa

SEQ ID NO: 29846 - DNA, 20 bp, synthetic construct
  source 1..20: mol_type = other DNA
tacctggtaaagttgttccg

SEQ ID NO: 29847 - DNA, 20 bp, synthetic construct
  source 1..20: mol_type = other DNA
acgagaagttctccgaaggg

SEQ ID NO: 29848 - DNA, 20 bp, synthetic construct
  source 1..20: mol_type = other DNA
gggaaagtaaacggaaccgg

SEQ ID NO: 29849 - DNA, 20 bp, synthetic construct
  source 1..20: mol_type = other DNA
ggaggaagccaaacgcatca

SEQ ID NO: 29850 - DNA, 20 bp, synthetic construct
  source 1..20: mol_type = other DNA
gatgtcgatgcggtcgggcg

SEQ ID NO: 29851 - DNA, 20 bp, synthetic construct
  source 1..20: mol_type = other DNA
ccgttcgcgctccaccaaca

SEQ ID NO: 29852 - DNA, 20 bp, synthetic construct
  source 1..20: mol_type = other DNA
cgtgttggtggagcgcgaac

SEQ ID NO: 29853 - DNA, 20 bp, synthetic construct
  source 1..20: mol_type = other DNA
cccgggacaaggagcgcgtg

SEQ ID NO: 29854 - DNA, 20 bp, synthetic construct
  source 1..20: mol_type = other DNA
aatagaagaaaaactcatcg

SEQ ID NO: 29855 - DNA, 20 bp, synthetic construct
  source 1..20: mol_type = other DNA
ggacgagaagcagaagcgag

SEQ ID NO: 29856 - DNA, 20 bp, synthetic construct
  source 1..20: mol_type = other DNA
tgcgcccgaagatgtcgatg

SEQ ID NO: 29857 - DNA, 20 bp, synthetic construct
  source 1..20: mol_type = other DNA
agaagaaagcggagttcgag

SEQ ID NO: 29858 - DNA, 20 bp, synthetic construct
  source 1..20: mol_type = other DNA
acaagaagcgcagccggtcc

SEQ ID NO: 29859 - DNA, 20 bp, synthetic construct
  source 1..20: mol_type = other DNA
ggaaccggcggcgggagtcg

SEQ ID NO: 29860 - DNA, 20 bp, synthetic construct
  source 1..20: mol_type = other DNA
ggaagaactggagaaaagga

SEQ ID NO: 29861 - DNA, 20 bp, synthetic construct
  source 1..20: mol_type = other DNA
agaattggtagcaaaaaggg

SEQ ID NO: 29862 - DNA, 20 bp, synthetic construct
  source 1..20: mol_type = other DNA
cattaatggtcacttcgcca

SEQ ID NO: 29863 - DNA, 20 bp, synthetic construct
  source 1..20: mol_type = other DNA
tggtaattcagaccacaccc

SEQ ID NO: 29864 - DNA, 20 bp, synthetic construct
  source 1..20: mol_type = other DNA
caatggagcaagccatctcg

SEQ ID NO: 29865 - DNA, 20 bp, synthetic construct
  source 1..20: mol_type = other DNA
agagttcagcagatgatgtg

SEQ ID NO: 29866 - DNA, 20 bp, synthetic construct
  source 1..20: mol_type = other DNA
agatccagacccagaccacg

SEQ ID NO: 29867 - DNA, 20 bp, synthetic construct
  source 1..20: mol_type = other DNA
gcagagtgccagaacgacag

SEQ ID NO: 29868 - DNA, 20 bp, synthetic construct
  source 1..20: mol_type = other DNA
ttgtcatccactcctacacc

SEQ ID NO: 29869 - DNA, 20 bp, synthetic construct
  source 1..20: mol_type = other DNA
tgaatgaacaaagagagcgt

SEQ ID NO: 29870 - DNA, 20 bp, synthetic construct
  source 1..20: mol_type = other DNA
ggcaaatgtagtgtattatg

SEQ ID NO: 29871 - DNA, 20 bp, synthetic construct
  source 1..20: mol_type = other DNA
aaaatacccaacaattgcag

SEQ ID NO: 29872 - DNA, 20 bp, synthetic construct
  source 1..20: mol_type = other DNA
tagggtcatggcgaaaaagc

SEQ ID NO: 29873 - DNA, 20 bp, synthetic construct
  source 1..20: mol_type = other DNA
agtctgtcaaacacacgaag

SEQ ID NO: 29874 - DNA, 20 bp, synthetic construct
  source 1..20: mol_type = other DNA
gcaacaatatcccactcatg

SEQ ID NO: 29875 - DNA, 20 bp, synthetic construct
  source 1..20: mol_type = other DNA
gcggccagtgatatccagga

SEQ ID NO: 29876 - DNA, 20 bp, synthetic construct
  source 1..20: mol_type = other DNA
gaggagcccttgggaatgac

SEQ ID NO: 29877 - DNA, 20 bp, synthetic construct
  source 1..20: mol_type = other DNA
agaggcgtaacaggcgtaag

SEQ ID NO: 29878 - DNA, 20 bp, synthetic construct
  source 1..20: mol_type = other DNA
ggagacacgcatcgactcgg

SEQ ID NO: 29879 - DNA, 20 bp, synthetic construct
  source 1..20: mol_type = other DNA
gaggttcacgatgcgcacca

SEQ ID NO: 29880 - DNA, 20 bp, synthetic construct
  source 1..20: mol_type = other DNA
aggatgagaacaccacaccc

SEQ ID NO: 29881 - DNA, 20 bp, synthetic construct
  source 1..20: mol_type = other DNA
gcatggacgtcacgaagttg

SEQ ID NO: 29882 - DNA, 20 bp, synthetic construct
  source 1..20: mol_type = other DNA
tactacgagcaccgctacca

SEQ ID NO: 29883 - DNA, 20 bp, synthetic construct
  source 1..20: mol_type = other DNA
tgctgtgcatcggctacggg

SEQ ID NO: 29884 - DNA, 20 bp, synthetic construct
  source 1..20: mol_type = other DNA
gggcgtcctgtcctcgccgg

SEQ ID NO: 29885 - DNA, 20 bp, synthetic construct
  source 1..20: mol_type = other DNA
tcattcgatatattcaccag

SEQ ID NO: 29886 - DNA, 20 bp, synthetic construct
  source 1..20: mol_type = other DNA
gcgaagggccttcgagaccg

SEQ ID NO: 29887 - DNA, 20 bp, synthetic construct
  source 1..20: mol_type = other DNA
ttgatagcggtgtccaccga

SEQ ID NO: 29888 - DNA, 20 bp, synthetic construct
  source 1..20: mol_type = other DNA
cggcgaccagatcctcccgg

SEQ ID NO: 29889 - DNA, 20 bp, synthetic construct
  source 1..20: mol_type = other DNA
tcagggaagtcctgtagcat

SEQ ID NO: 29890 - DNA, 20 bp, synthetic construct
  source 1..20: mol_type = other DNA
ccacgctcagcgagtagagg

SEQ ID NO: 29891 - DNA, 20 bp, synthetic construct
  source 1..20: mol_type = other DNA
gtccagcacgacctcaactc

SEQ ID NO: 29892 - DNA, 20 bp, synthetic construct
  source 1..20: mol_type = other DNA
aaatctgcagacatacacaa

SEQ ID NO: 29893 - DNA, 20 bp, synthetic construct
  source 1..20: mol_type = other DNA
aaccggccaaaacacagtgt

SEQ ID NO: 29894 - DNA, 20 bp, synthetic construct
  source 1..20: mol_type = other DNA
tcatgggacatagagacacc

SEQ ID NO: 29895 - DNA, 20 bp, synthetic construct
  source 1..20: mol_type = other DNA
gtctaatataaaacacaccg

SEQ ID NO: 29896 - DNA, 20 bp, synthetic construct
  source 1..20: mol_type = other DNA
gtttagttccacccaccgag

SEQ ID NO: 29897 - DNA, 20 bp, synthetic construct
  source 1..20: mol_type = other DNA
cggtgggtggaactaaaccg

SEQ ID NO: 29898 - DNA, 20 bp, synthetic construct
  source 1..20: mol_type = other DNA
gaggatgactctcatctcga

SEQ ID NO: 29899 - DNA, 20 bp, synthetic construct
  source 1..20: mol_type = other DNA
tgcagcctggattaccaatg

SEQ ID NO: 29900 - DNA, 20 bp, synthetic construct
  source 1..20: mol_type = other DNA
agatgatgaattctatcagc

SEQ ID NO: 29901 - DNA, 20 bp, synthetic construct
  source 1..20: mol_type = other DNA
gaggaaggtctcacaagcag

SEQ ID NO: 29902 - DNA, 20 bp, synthetic construct
  source 1..20: mol_type = other DNA
ccaggctctttacggtcccc

SEQ ID NO: 29903 - DNA, 20 bp, synthetic construct
  source 1..20: mol_type = other DNA
tctggtggacaggtcagcgg

SEQ ID NO: 29904 - DNA, 20 bp, synthetic construct
  source 1..20: mol_type = other DNA
ttggcgataccccttcacca

SEQ ID NO: 29905 - DNA, 20 bp, synthetic construct
  source 1..20: mol_type = other DNA
cctacaagtacctgaacacc

SEQ ID NO: 29906 - DNA, 20 bp, synthetic construct
  source 1..20: mol_type = other DNA
cgggacctggttaggatcca

SEQ ID NO: 29907 - DNA, 20 bp, synthetic construct
  source 1..20: mol_type = other DNA
taccaccccgactattacgg

SEQ ID NO: 29908 - DNA, 20 bp, synthetic construct
  source 1..20: mol_type = other DNA
cctataccttgagatagcgt

SEQ ID NO: 29909 - DNA, 20 bp, synthetic construct
  source 1..20: mol_type = other DNA
gcccacctgaaacacgatcc

SEQ ID NO: 29910 - DNA, 20 bp, synthetic construct
  source 1..20: mol_type = other DNA
ccaggtctaacacgtagtcg

SEQ ID NO: 29911 - DNA, 20 bp, synthetic construct
  source 1..20: mol_type = other DNA
tcaggcaacgcatgaacaag

SEQ ID NO: 29912 - DNA, 20 bp, synthetic construct
  source 1..20: mol_type = other DNA
tggacctgttcgtacggagc

SEQ ID NO: 29913 - DNA, 20 bp, synthetic construct
  source 1..20: mol_type = other DNA
tgcatacaagaccttggcga

SEQ ID NO: 29914 - DNA, 20 bp, synthetic construct
  source 1..20: mol_type = other DNA
ggacatcaacaactatccta

SEQ ID NO: 29915 - DNA, 20 bp, synthetic construct
  source 1..20: mol_type = other DNA
accgtgaggatccgcaagga

SEQ ID NO: 29916 - DNA, 20 bp, synthetic construct
  source 1..20: mol_type = other DNA
ggtatgggaggtcatagggt

SEQ ID NO: 29917 - DNA, 20 bp, synthetic construct
  source 1..20: mol_type = other DNA
ggtgcactcctggagtacgg

SEQ ID NO: 29918 - DNA, 20 bp, synthetic construct
  source 1..20: mol_type = other DNA
cggcgggagcccctgaacga

SEQ ID NO: 29919 - DNA, 20 bp, synthetic construct
  source 1..20: mol_type = other DNA
agtgagatgaggttgatgca

SEQ ID NO: 29920 - DNA, 20 bp, synthetic construct
  source 1..20: mol_type = other DNA
gaggaaccgcgcaagcgagg

SEQ ID NO: 29921 - DNA, 20 bp, synthetic construct
  source 1..20: mol_type = other DNA
ggagagcccgcgagaacccg

SEQ ID NO: 29922 - DNA, 20 bp, synthetic construct
  source 1..20: mol_type = other DNA
tgaaggcatccccatatgtg

SEQ ID NO: 29923 - DNA, 20 bp, synthetic construct
  source 1..20: mol_type = other DNA
gctgactactgtgtactgca

SEQ ID NO: 29924 - DNA, 20 bp, synthetic construct
  source 1..20: mol_type = other DNA
tggcgggctggccatcacag

SEQ ID NO: 29925 - DNA, 20 bp, synthetic construct
  source 1..20: mol_type = other DNA
atattgacccaagtaggccg

SEQ ID NO: 29926 - DNA, 20 bp, synthetic construct
  source 1..20: mol_type = other DNA
ggagttagacccggccaaag

SEQ ID NO: 29927 - DNA, 20 bp, synthetic construct
  source 1..20: mol_type = other DNA
gaacctctgcagctcgagca

SEQ ID NO: 29928 - DNA, 20 bp, synthetic construct
  source 1..20: mol_type = other DNA
ggcaagtggcccggagctgt

SEQ ID NO: 29929 - DNA, 20 bp, synthetic construct
  source 1..20: mol_type = other DNA
cagggaccaagtgggaacta

SEQ ID NO: 29930 - DNA, 20 bp, synthetic construct
  source 1..20: mol_type = other DNA
gcgattactacagtcccagg

SEQ ID NO: 29931 - DNA, 20 bp, synthetic construct
  source 1..20: mol_type = other DNA
cagatacgccgaaagcctgc

SEQ ID NO: 29932 - DNA, 20 bp, synthetic construct
  source 1..20: mol_type = other DNA
tcagcctggccctcaaaagg

SEQ ID NO: 29933 - DNA, 20 bp, synthetic construct
  source 1..20: mol_type = other DNA
agccgaaaacgccttcactg

SEQ ID NO: 29934 - DNA, 20 bp, synthetic construct
  source 1..20: mol_type = other DNA
gctcaggatctgtccggcca

SEQ ID NO: 29935 - DNA, 20 bp, synthetic construct
  source 1..20: mol_type = other DNA
gccatgcttgttccgtacca

SEQ ID NO: 29936 - DNA, 20 bp, synthetic construct
  source 1..20: mol_type = other DNA
ggtgggctcctgaggtcacg

SEQ ID NO: 29937 - DNA, 20 bp, synthetic construct
  source 1..20: mol_type = other DNA
acacgaagtgttgcaaacgt

SEQ ID NO: 29938 - DNA, 20 bp, synthetic construct
  source 1..20: mol_type = other DNA
acaattacctgcacgacaca

SEQ ID NO: 29939 - DNA, 20 bp, synthetic construct
  source 1..20: mol_type = other DNA
ttcccatcaagaccagacaa

SEQ ID NO: 29940 - DNA, 20 bp, synthetic construct
  source 1..20: mol_type = other DNA
aagccgggctatgtgtcccg

SEQ ID NO: 29941 - DNA, 20 bp, synthetic construct
  source 1..20: mol_type = other DNA
aagtttatctgccctctcac

SEQ ID NO: 29942 - DNA, 20 bp, synthetic construct
  source 1..20: mol_type = other DNA
gaatacgtaatctcttctcc

SEQ ID NO: 29943 - DNA, 20 bp, synthetic construct
  source 1..20: mol_type = other DNA
gcaaacgtaggtatggatgg

SEQ ID NO: 29944 - DNA, 20 bp, synthetic construct
  source 1..20: mol_type = other DNA
acagacttacgagcacagac

SEQ ID NO: 29945 - DNA, 20 bp, synthetic construct
  source 1..20: mol_type = other DNA
aaactgctgtgtcccgatag

SEQ ID NO: 29946 - DNA, 20 bp, synthetic construct
  source 1..20: mol_type = other DNA
taaatcatctggcttgggac

SEQ ID NO: 29947 - DNA, 20 bp, synthetic construct
  source 1..20: mol_type = other DNA
tccagcaaaaggacatactc

SEQ ID NO: 29948 - DNA, 20 bp, synthetic construct
  source 1..20: mol_type = other DNA
ggactaaattaccagaatgc

SEQ ID NO: 29949 - DNA, 20 bp, synthetic construct
  source 1..20: mol_type = other DNA
gccatgttgctattgcagga

SEQ ID NO: 29950 - DNA, 20 bp, synthetic construct
  source 1..20: mol_type = other DNA
gattacgtattcctgcaagc

SEQ ID NO: 29951 - DNA, 20 bp, synthetic construct
  source 1..20: mol_type = other DNA
tgattctgccaagtgcactg

SEQ ID NO: 29952 - DNA, 20 bp, synthetic construct
  source 1..20: mol_type = other DNA
aatccgccgatcctacgctc

SEQ ID NO: 29953 - DNA, 20 bp, synthetic construct
  source 1..20: mol_type = other DNA
ggaattcatcgtgtacccgg

SEQ ID NO: 29954 - DNA, 20 bp, synthetic construct
  source 1..20: mol_type = other DNA
gatacgggaccagtcgatag

SEQ ID NO: 29955 - DNA, 20 bp, synthetic construct
  source 1..20: mol_type = other DNA
ggatgaacgccggacctatg

SEQ ID NO: 29956 - DNA, 20 bp, synthetic construct
  source 1..20: mol_type = other DNA
gaatcttcagactcgaatgg

SEQ ID NO: 29957 - DNA, 20 bp, synthetic construct
  source 1..20: mol_type = other DNA
tggcagcctacgtcagtgcg

SEQ ID NO: 29958 - DNA, 20 bp, synthetic construct
  source 1..20: mol_type = other DNA
ggctctcgagcccatagacc

SEQ ID NO: 29959 - DNA, 20 bp, synthetic construct
  source 1..20: mol_type = other DNA
ggcagacgtcaccgagtcga

SEQ ID NO: 29960 - DNA, 20 bp, synthetic construct
  source 1..20: mol_type = other DNA
gcagccgtgtgacttacaga

SEQ ID NO: 29961 - DNA, 20 bp, synthetic construct
  source 1..20: mol_type = other DNA
actgttctttaactacgcgc

SEQ ID NO: 29962 - DNA, 20 bp, synthetic construct
  source 1..20: mol_type = other DNA
ttatcggcgatatggtgatg

SEQ ID NO: 29963 - DNA, 20 bp, synthetic construct
  source 1..20: mol_type = other DNA
agaatgtgacggagttcgac

SEQ ID NO: 29964 - DNA, 20 bp, synthetic construct
  source 1..20: mol_type = other DNA
tagacattgacccacccctg

SEQ ID NO: 29965 - DNA, 20 bp, synthetic construct
  source 1..20: mol_type = other DNA
ccaagaggtctcggaagtcg

SEQ ID NO: 29966 - DNA, 20 bp, synthetic construct
  source 1..20: mol_type = other DNA
tgaggattacctgcacaacg

SEQ ID NO: 29967 - DNA, 20 bp, synthetic construct
  source 1..20: mol_type = other DNA
gaggagcaggagttcgccga

SEQ ID NO: 29968 - DNA, 20 bp, synthetic construct
  source 1..20: mol_type = other DNA
tagaggaactgtgagctcgt

SEQ ID NO: 29969 - DNA, 20 bp, synthetic construct
  source 1..20: mol_type = other DNA
ggcagcgaaggcgaccgtcg

SEQ ID NO: 29970 - DNA, 20 bp, synthetic construct
  source 1..20: mol_type = other DNA
ttacacaagcagaaccagct

SEQ ID NO: 29971 - DNA, 20 bp, synthetic construct
  source 1..20: mol_type = other DNA
tgctcgcctctcccgacctg

SEQ ID NO: 29972 - DNA, 20 bp, synthetic construct
  source 1..20: mol_type = other DNA
gcgaacctgagcagctacgc

SEQ ID NO: 29973 - DNA, 20 bp, synthetic construct
  source 1..20: mol_type = other DNA
acagttcctctaccccaagg

SEQ ID NO: 29974 - DNA, 20 bp, synthetic construct
  source 1..20: mol_type = other DNA
cctacccccctgcgcgccga

SEQ ID NO: 29975 - DNA, 20 bp, synthetic construct
  source 1..20: mol_type = other DNA
gaggcgagcaggccgtcggg

SEQ ID NO: 29976 - DNA, 20 bp, synthetic construct
  source 1..20: mol_type = other DNA
ggggcgccccggggaacaag

SEQ ID NO: 29977 - DNA, 20 bp, synthetic construct
  source 1..20: mol_type = other DNA
gatgaggcgctcgagctcgg

SEQ ID NO: 29978 - DNA, 20 bp, synthetic construct
  source 1..20: mol_type = other DNA
tggtgaccagcccgttggac

SEQ ID NO: 29979 - DNA, 20 bp, synthetic construct
  source 1..20: mol_type = other DNA
ggcggcagcgctcaagcctg

SEQ ID NO: 29980 - DNA, 20 bp, synthetic construct
  source 1..20: mol_type = other DNA
cgccggggccagctcgccgg

SEQ ID NO: 29981 - DNA, 20 bp, synthetic construct
  source 1..20: mol_type = other DNA
gttcgccgagggcttcgtca

SEQ ID NO: 29982 - DNA, 20 bp, synthetic construct
  source 1..20: mol_type = other DNA
gatgatgaggtccacaaccg

SEQ ID NO: 29983 - DNA, 20 bp, synthetic construct
  source 1..20: mol_type = other DNA
gtcataggagacctcgccat

SEQ ID NO: 29984 - DNA, 20 bp, synthetic construct
  source 1..20: mol_type = other DNA
tggttgagcgcgtaggacac

SEQ ID NO: 29985 - DNA, 20 bp, synthetic construct
  source 1..20: mol_type = other DNA
ctgactcaccagcatagagt

SEQ ID NO: 29986 - DNA, 20 bp, synthetic construct
  source 1..20: mol_type = other DNA
tcatcaatgccacccacagg

SEQ ID NO: 29987 - DNA, 20 bp, synthetic construct
  source 1..20: mol_type = other DNA
gtgcagcgggttagcgcccg

SEQ ID NO: 29988 - DNA, 20 bp, synthetic construct
  source 1..20: mol_type = other DNA
caggaagacagctatgtggt

SEQ ID NO: 29989 - DNA, 20 bp, synthetic construct
  source 1..20: mol_type = other DNA
caaggatgagatatatgaca

SEQ ID NO: 29990 - DNA, 20 bp, synthetic construct
  source 1..20: mol_type = other DNA
ttgatgagcgccctaatcct

SEQ ID NO: 29991 - DNA, 20 bp, synthetic construct
  source 1..20: mol_type = other DNA
catggagttctacaccaagg

SEQ ID NO: 29992 - DNA, 20 bp, synthetic construct
  source 1..20: mol_type = other DNA
atagacaaagcaggcatctg

SEQ ID NO: 29993 - DNA, 20 bp, synthetic construct
  source 1..20: mol_type = other DNA
gaagaaggcaggcctgatct

SEQ ID NO: 29994 - DNA, 20 bp, synthetic construct
  source 1..20: mol_type = other DNA
accttcatgccagcccagca

SEQ ID NO: 29995 - DNA, 20 bp, synthetic construct
  source 1..20: mol_type = other DNA
tggggcaatcaagcaccacc

SEQ ID NO: 29996 - DNA, 20 bp, synthetic construct
  source 1..20: mol_type = other DNA
aaggaacaccaggatgctca

SEQ ID NO: 29997 - DNA, 20 bp, synthetic construct
  source 1..20: mol_type = other DNA
gcggacatggaggacgtgtg

SEQ ID NO: 29998 - DNA, 20 bp, synthetic construct
  source 1..20: mol_type = other DNA
gctgatggacgagaccatga

SEQ ID NO: 29999 - DNA, 20 bp, synthetic construct
  source 1..20: mol_type = other DNA
ggccaaggtggagcaagcgg

SEQ ID NO: 30000 - DNA, 20 bp, synthetic construct
  source 1..20: mol_type = other DNA
ggcctacaaatcggaactgg

SEQ ID NO: 30001 - DNA, 20 bp, synthetic construct
  source 1..20: mol_type = other DNA
acctgcgcaagctgcgtaag

SEQ ID NO: 30002 - DNA, 20 bp, synthetic construct
  source 1..20: mol_type = other DNA
ggccgcctggtgcagtaccg

SEQ ID NO: 30003 - DNA, 20 bp, synthetic construct
  source 1..20: mol_type = other DNA
cccaggtcacccaggaactg

SEQ ID NO: 30004 - DNA, 20 bp, synthetic construct
  source 1..20: mol_type = other DNA
acagtgtctgcacccagcgc

SEQ ID NO: 30005 - DNA, 20 bp, synthetic construct
  source 1..20: mol_type = other DNA
ggaacaactgaccccggtgg

SEQ ID NO: 30006 - DNA, 20 bp, synthetic construct
  source 1..20: mol_type = other DNA
gagcggccagcgctgggaac

SEQ ID NO: 30007 - DNA, 20 bp, synthetic construct
  source 1..20: mol_type = other DNA
catgctcggccagagcaccg

SEQ ID NO: 30008 - DNA, 20 bp, synthetic construct
  source 1..20: mol_type = other DNA
ccacacaggatgccaggcca

SEQ ID NO: 30009 - DNA, 20 bp, synthetic construct
  source 1..20: mol_type = other DNA
ggtgcagacactgtctgagc

SEQ ID NO: 30010 - DNA, 20 bp, synthetic construct
  source 1..20: mol_type = other DNA
agctgcgccagcagaccgag

SEQ ID NO: 30011 - DNA, 20 bp, synthetic construct
  source 1..20: mol_type = other DNA
tctgcaggtcatcggcatcg

SEQ ID NO: 30012 - DNA, 20 bp, synthetic construct
  source 1..20: mol_type = other DNA
ggaggcgaggcgaagaaaca

SEQ ID NO: 30013 - DNA, 20 bp, synthetic construct
  source 1..20: mol_type = other DNA
cagcgatgaagatggacgga

SEQ ID NO: 30014 - DNA, 20 bp, synthetic construct
  source 1..20: mol_type = other DNA
cacccgcaccaaccaaaccc

SEQ ID NO: 30015 - DNA, 20 bp, synthetic construct
  source 1..20: mol_type = other DNA
tggacactgaagaggatcgg

SEQ ID NO: 30016 - DNA, 20 bp, synthetic construct
  source 1..20: mol_type = other DNA
ggtaggtgaccgccaggcgt

SEQ ID NO: 30017 - DNA, 20 bp, synthetic construct
  source 1..20: mol_type = other DNA
ctgggctacggggtgcaccg

SEQ ID NO: 30018 - DNA, 20 bp, synthetic construct
  source 1..20: mol_type = other DNA
ggagcaatgagcttgaacac

SEQ ID NO: 30019 - DNA, 20 bp, synthetic construct
  source 1..20: mol_type = other DNA
ctgggacttcggtctctgcg

SEQ ID NO: 30020 - DNA, 20 bp, synthetic construct
  source 1..20: mol_type = other DNA
agggtctcggtaccgaaggg

SEQ ID NO: 30021 - DNA, 20 bp, synthetic construct
  source 1..20: mol_type = other DNA
tgggggttataggagccgca

SEQ ID NO: 30022 - DNA, 20 bp, synthetic construct
  source 1..20: mol_type = other DNA
gcagatgaggccaacggcaa

SEQ ID NO: 30023 - DNA, 20 bp, synthetic construct
  source 1..20: mol_type = other DNA
agcccagtagacgccataga

SEQ ID NO: 30024 - DNA, 20 bp, synthetic construct
  source 1..20: mol_type = other DNA
tggaatcagatcacttgtgg

SEQ ID NO: 30025 - DNA, 20 bp, synthetic construct
  source 1..20: mol_type = other DNA
ggagcgcctcccaaccaggt

SEQ ID NO: 30026 - DNA, 20 bp, synthetic construct
  source 1..20: mol_type = other DNA
tctgaccagctacagccacc

SEQ ID NO: 30027 - DNA, 20 bp, synthetic construct
  source 1..20: mol_type = other DNA
caacgtgggagactacatcg

SEQ ID NO: 30028 - DNA, 20 bp, synthetic construct
  source 1..20: mol_type = other DNA
catgggacccaatcacacac

SEQ ID NO: 30029 - DNA, 20 bp, synthetic construct
  source 1..20: mol_type = other DNA
gaaagataataaatgcgctg

SEQ ID NO: 30030 - DNA, 20 bp, synthetic construct
  source 1..20: mol_type = other DNA
cagccacttcacgccgtcgg

SEQ ID NO: 30031 - DNA, 20 bp, synthetic construct
  source 1..20: mol_type = other DNA
acgcgtccgtagaagtgcac

SEQ ID NO: 30032 - DNA, 20 bp, synthetic construct
  source 1..20: mol_type = other DNA
tgatggcatagattatctcc

SEQ ID NO: 30033 - DNA, 20 bp, synthetic construct
  source 1..20: mol_type = other DNA
gctgctgcgtgcggatccag

SEQ ID NO: 30034 - DNA, 20 bp, synthetic construct
  source 1..20: mol_type = other DNA
ccagcgcgaagaagtagtcg

SEQ ID NO: 30035 - DNA, 20 bp, synthetic construct
  source 1..20: mol_type = other DNA
atcatttggatacaggaccc

SEQ ID NO: 30036 - DNA, 20 bp, synthetic construct
  source 1..20: mol_type = other DNA
ggggctggccgataccatcg

SEQ ID NO: 30037 - DNA, 20 bp, synthetic construct
  source 1..20: mol_type = other DNA
agcttctcaaacatggacac

SEQ ID NO: 30038 - DNA, 20 bp, synthetic construct
  source 1..20: mol_type = other DNA
cagaacacgatggtgaacct

SEQ ID NO: 30039 - DNA, 20 bp, synthetic construct
  source 1..20: mol_type = other DNA
gccgatgactggctgcgcta

SEQ ID NO: 30040 - DNA, 20 bp, synthetic construct
  source 1..20: mol_type = other DNA
aggatgtctgtgatcgagga

SEQ ID NO: 30041 - DNA, 20 bp, synthetic construct
  source 1..20: mol_type = other DNA
ccaatggcatcaccccccgc

SEQ ID NO: 30042 - DNA, 20 bp, synthetic construct
  source 1..20: mol_type = other DNA
gatgtacgtcacaaggccca

SEQ ID NO: 30043 - DNA, 20 bp, synthetic construct
  source 1..20: mol_type = other DNA
tggagatatcgtcacagtgg

SEQ ID NO: 30044 - DNA, 20 bp, synthetic construct
  source 1..20: mol_type = other DNA
cacagaccccgtaaccaacg

SEQ ID NO: 30045 - DNA, 20 bp, synthetic construct
  source 1..20: mol_type = other DNA
cgaaaaccgcgtggagaccg

SEQ ID NO: 30046 - DNA, 20 bp, synthetic construct
  source 1..20: mol_type = other DNA
agggtccacagctgaaaacg

SEQ ID NO: 30047 - DNA, 20 bp, synthetic construct
  source 1..20: mol_type = other DNA
ggccgtgacggtcatcacgt

SEQ ID NO: 30048 - DNA, 20 bp, synthetic construct
  source 1..20: mol_type = other DNA
ggatcagcttgtggtttgag

SEQ ID NO: 30049 - DNA, 20 bp, synthetic construct
  source 1..20: mol_type = other DNA
aacgtgcccgagaactcgcg

SEQ ID NO: 30050 - DNA, 20 bp, synthetic construct
  source 1..20: mol_type = other DNA
ccggtaccgcaccatcccgt

SEQ ID NO: 30051 - DNA, 20 bp, synthetic construct
  source 1..20: mol_type = other DNA
ggccaccagcaaccgcacca

SEQ ID NO: 30052 - DNA, 20 bp, synthetic construct
  source 1..20: mol_type = other DNA
atggaaggaaatctcaacta

SEQ ID NO: 30053 - DNA, 20 bp, synthetic construct
  source 1..20: mol_type = other DNA
cctggttgatgaactcaggg

SEQ ID NO: 30054 - DNA, 20 bp, synthetic construct
  source 1..20: mol_type = other DNA
ggcgttcacggtgactgcat

SEQ ID NO: 30055 - DNA, 20 bp, synthetic construct
  source 1..20: mol_type = other DNA
ccagctccgagcccacgctg

SEQ ID NO: 30056 - DNA, 20 bp, synthetic construct
  source 1..20: mol_type = other DNA
atgctgaagacctccatggg

SEQ ID NO: 30057 - DNA, 20 bp, synthetic construct
  source 1..20: mol_type = other DNA
cttactgtttaggcccacgg

SEQ ID NO: 30058 - DNA, 20 bp, synthetic construct
  source 1..20: mol_type = other DNA
cgtcattgactccaccgacg

SEQ ID NO: 30059 - DNA, 20 bp, synthetic construct
  source 1..20: mol_type = other DNA
cagtattatgcggagtgtca

SEQ ID NO: 30060 - DNA, 20 bp, synthetic construct
  source 1..20: mol_type = other DNA
tgcttcctcccagtattatg

SEQ ID NO: 30061 - DNA, 20 bp, synthetic construct
  source 1..20: mol_type = other DNA
gaggctggctgagtccaagc

SEQ ID NO: 30062 - DNA, 20 bp, synthetic construct
  source 1..20: mol_type = other DNA
ccagtcggcactgtggatgt

SEQ ID NO: 30063 - DNA, 20 bp, synthetic construct
  source 1..20: mol_type = other DNA
gtgaccagcgaggcgctgtg

SEQ ID NO: 30064 - DNA, 20 bp, synthetic construct
  source 1..20: mol_type = other DNA
cacatccacagtgccgactg

SEQ ID NO: 30065 - DNA, 20 bp, synthetic construct
  source 1..20: mol_type = other DNA
tgttggccagcaccaagacg

SEQ ID NO: 30066 - DNA, 20 bp, synthetic construct
  source 1..20: mol_type = other DNA
gctgcagtctttgtgggaca

SEQ ID NO: 30067 - DNA, 20 bp, synthetic construct
  source 1..20: mol_type = other DNA
gatttaacaagaactacaag

SEQ ID NO: 30068 - DNA, 20 bp, synthetic construct
  source 1..20: mol_type = other DNA
gagtactgcatcctgatcct

SEQ ID NO: 30069 - DNA, 20 bp, synthetic construct
  source 1..20: mol_type = other DNA
tcctgggcctggacaatgct

SEQ ID NO: 30070 - DNA, 20 bp, synthetic construct
  source 1..20: mol_type = other DNA
gctgagtccaagcaggcgtt

SEQ ID NO: 30071 - DNA, 20 bp, synthetic construct
  source 1..20: mol_type = other DNA
gtacaagtacatgtttcaga

SEQ ID NO: 30072 - DNA, 20 bp, synthetic construct
  source 1..20: mol_type = other DNA
tccagagcagagtatacctg

SEQ ID NO: 30073 - DNA, 20 bp, synthetic construct
  source 1..20: mol_type = other DNA
tgactccgaggaatccatgg

SEQ ID NO: 30074 - DNA, 20 bp, synthetic construct
  source 1..20: mol_type = other DNA
gattcctcggagtcatgaca

SEQ ID NO: 30075 - DNA, 20 bp, synthetic construct
  source 1..20: mol_type = other DNA
gtatacctgaggcgtcattg

SEQ ID NO: 30076 - DNA, 20 bp, synthetic construct
  source 1..20: mol_type = other DNA
aaatcaccctgcttgagcaa

SEQ ID NO: 30077 - DNA, 20 bp, synthetic construct
  source 1..20: mol_type = other DNA
aaaggaatggagtcttcagg

SEQ ID NO: 30078 - DNA, 20 bp, synthetic construct
  source 1..20: mol_type = other DNA
tcatgactccgaggaatcca

SEQ ID NO: 30079 - DNA, 20 bp, synthetic construct
  source 1..20: mol_type = other DNA
gagtcatgacaaggcggcag

SEQ ID NO: 30080 - DNA, 20 bp, synthetic construct
  source 1..20: mol_type = other DNA
tagaccagcagctacaggta

SEQ ID NO: 30081 - DNA, 20 bp, synthetic construct
  source 1..20: mol_type = other DNA
tcctcggagtcatgacaagg

SEQ ID NO: 30082 - DNA, 20 bp, synthetic construct
  source 1..20: mol_type = other DNA
aatagcagaagaataccatg

SEQ ID NO: 30083 - DNA, 20 bp, synthetic construct
  source 1..20: mol_type = other DNA
gccgccttgtcatgactccg

SEQ ID NO: 30084 - DNA, 20 bp, synthetic construct
  source 1..20: mol_type = other DNA
ggagtcatgacaaggcggca

SEQ ID NO: 30085 - DNA, 20 bp, synthetic construct
  source 1..20: mol_type = other DNA
caaaggaatggagtcttcag

SEQ ID NO: 30086 - DNA, 20 bp, synthetic construct
  source 1..20: mol_type = other DNA
tctaattctggaaagaccaa

SEQ ID NO: 30087 - DNA, 20 bp, synthetic construct
  source 1..20: mol_type = other DNA
tcggtccaaagacgaagtcg

SEQ ID NO: 30088 - DNA, 20 bp, synthetic construct
  source 1..20: mol_type = other DNA
tgtcgtactccccatagaag

SEQ ID NO: 30089 - DNA, 20 bp, synthetic construct
  source 1..20: mol_type = other DNA
gccgacgcagtgcaacgccc

SEQ ID NO: 30090 - DNA, 20 bp, synthetic construct
  source 1..20: mol_type = other DNA
acaacatgcgcgcgtcgcgg

SEQ ID NO: 30091 - DNA, 20 bp, synthetic construct
  source 1..20: mol_type = other DNA
atgcatccaaatatcctcga

SEQ ID NO: 30092 - DNA, 20 bp, synthetic construct
  source 1..20: mol_type = other DNA
ccttccgcacaagatctgag

SEQ ID NO: 30093 - DNA, 20 bp, synthetic construct
  source 1..20: mol_type = other DNA
gatgaagcaggaacatacca

SEQ ID NO: 30094 - DNA, 20 bp, synthetic construct
  source 1..20: mol_type = other DNA
aagctctcgagagaaggtag

SEQ ID NO: 30095 - DNA, 20 bp, synthetic construct
  source 1..20: mol_type = other DNA
ctcagtctacgcctctgcac

SEQ ID NO: 30096 - DNA, 20 bp, synthetic construct
  source 1..20: mol_type = other DNA
aaggccaggagtcggaacat

SEQ ID NO: 30097 - DNA, 20 bp, synthetic construct
  source 1..20: mol_type = other DNA
ggcatttgcagagaccctgt

SEQ ID NO: 30098 - DNA, 20 bp, synthetic construct
  source 1..20: mol_type = other DNA
gcagaggcgtagactgagct

SEQ ID NO: 30099 - DNA, 20 bp, synthetic construct
  source 1..20: mol_type = other DNA
ggagatgagctggtggacat

SEQ ID NO: 30100 - DNA, 20 bp, synthetic construct
  source 1..20: mol_type = other DNA
tcttaccagagtgtctgatg

SEQ ID NO: 30101 - DNA, 20 bp, synthetic construct
  source 1..20: mol_type = other DNA
cttaccacgcctctgaagga

SEQ ID NO: 30102 - DNA, 20 bp, synthetic construct
  source 1..20: mol_type = other DNA
taggcaaagtagtacagccc

SEQ ID NO: 30103 - DNA, 20 bp, synthetic construct
  source 1..20: mol_type = other DNA
gttgcagtggaatttaccag

SEQ ID NO: 30104 - DNA, 20 bp, synthetic construct
  source 1..20: mol_type = other DNA
gaatgctgagcggtatacat

SEQ ID NO: 30105 - DNA, 20 bp, synthetic construct
  source 1..20: mol_type = other DNA
taccgctcagcattcagtgt

SEQ ID NO: 30106 - DNA, 20 bp, synthetic construct
  source 1..20: mol_type = other DNA
tggattcccggaaagcctcg

SEQ ID NO: 30107 - DNA, 20 bp, synthetic construct
  source 1..20: mol_type = other DNA
acagcccaggaatgttgcag

SEQ ID NO: 30108 - DNA, 20 bp, synthetic construct
  source 1..20: mol_type = other DNA
gtggtttcctggtcatgacc

SEQ ID NO: 30109 - DNA, 20 bp, synthetic construct
  source 1..20: mol_type = other DNA
taaagcgaatgggcatgttg

SEQ ID NO: 30110 - DNA, 20 bp, synthetic construct
  source 1..20: mol_type = other DNA
cggtgaaaccggagtacccg

SEQ ID NO: 30111 - DNA, 20 bp, synthetic construct
  source 1..20: mol_type = other DNA
atcccacactgaatgctgag

SEQ ID NO: 30112 - DNA, 20 bp, synthetic construct
  source 1..20: mol_type = other DNA
agggcatccgggccataatg

SEQ ID NO: 30113 - DNA, 20 bp, synthetic construct
  source 1..20: mol_type = other DNA
cttaggaccaataagaccta

SEQ ID NO: 30114 - DNA, 20 bp, synthetic construct
  source 1..20: mol_type = other DNA
gactccgggcccttgagtcg

SEQ ID NO: 30115 - DNA, 20 bp, synthetic construct
  source 1..20: mol_type = other DNA
aagatcttggtaaagcgaat

SEQ ID NO: 30116 - DNA, 20 bp, synthetic construct
  source 1..20: mol_type = other DNA
tatacataggcaccttctcc

SEQ ID NO: 30117 - DNA, 20 bp, synthetic construct
  source 1..20: mol_type = other DNA
ttgggacgtagattcagtcg

SEQ ID NO: 30118 - DNA, 20 bp, synthetic construct
  source 1..20: mol_type = other DNA
gctggttaccaatcggccgg

SEQ ID NO: 30119 - DNA, 20 bp, synthetic construct
  source 1..20: mol_type = other DNA
cactaggctgcggtacccgt

SEQ ID NO: 30120 - DNA, 20 bp, synthetic construct
  source 1..20: mol_type = other DNA
tatgcagcgtgacatactcc

SEQ ID NO: 30121 - DNA, 20 bp, synthetic construct
  source 1..20: mol_type = other DNA
cctgcacaaatcccgctatg

SEQ ID NO: 30122 - DNA, 20 bp, synthetic construct
  source 1..20: mol_type = other DNA
tggatgtaaggtgattgctg

SEQ ID NO: 30123 - DNA, 20 bp, synthetic construct
  source 1..20: mol_type = other DNA
gggcgtagtagaccagagcg

SEQ ID NO: 30124 - DNA, 20 bp, synthetic construct
  source 1..20: mol_type = other DNA
gcgatcagccctagagtgga

SEQ ID NO: 30125 - DNA, 20 bp, synthetic construct
  source 1..20: mol_type = other DNA
gtgtacgggagcaggcgctg

SEQ ID NO: 30126 - DNA, 20 bp, synthetic construct
  source 1..20: mol_type = other DNA
aagcaaacaacgccagtcca

SEQ ID NO: 30127 - DNA, 20 bp, synthetic construct
  source 1..20: mol_type = other DNA
cctccagctcggccaggttg

SEQ ID NO: 30128 - DNA, 20 bp, synthetic construct
  source 1..20: mol_type = other DNA
acagtcgctggtgactctgg

SEQ ID NO: 30129 - DNA, 20 bp, synthetic construct
  source 1..20: mol_type = other DNA
aaagtgatgtcaggatacag

SEQ ID NO: 30130 - DNA, 20 bp, synthetic construct
  source 1..20: mol_type = other DNA
tcacctggaagcccaggcag

SEQ ID NO: 30131 - DNA, 20 bp, synthetic construct
  source 1..20: mol_type = other DNA
agaagctgaatcaacacctg

SEQ ID NO: 30132 - DNA, 20 bp, synthetic construct
  source 1..20: mol_type = other DNA
caggatcggcctctacgaca

SEQ ID NO: 30133 - DNA, 20 bp, synthetic construct
  source 1..20: mol_type = other DNA
ttagctggtctaacgactgg

SEQ ID NO: 30134 - DNA, 20 bp, synthetic construct
  source 1..20: mol_type = other DNA
cctgggaacaatcaccgctg

SEQ ID NO: 30135 - DNA, 20 bp, synthetic construct
  source 1..20: mol_type = other DNA
tccaggagttcctcaccgca

SEQ ID NO: 30136 - DNA, 20 bp, synthetic construct
  source 1..20: mol_type = other DNA
gggcggatgaaactctacag

SEQ ID NO: 30137 - DNA, 20 bp, synthetic construct
  source 1..20: mol_type = other DNA
tacctaataacactggacgt

SEQ ID NO: 30138 - DNA, 20 bp, synthetic construct
  source 1..20: mol_type = other DNA
tggacgtcgggcattcacct

SEQ ID NO: 30139 - DNA, 20 bp, synthetic construct
  source 1..20: mol_type = other DNA
gtagaggccgatcctgagag

SEQ ID NO: 30140 - DNA, 20 bp, synthetic construct
  source 1..20: mol_type = other DNA
tggaatagcggcgtgcttgg

SEQ ID NO: 30141 - DNA, 20 bp, synthetic construct
  source 1..20: mol_type = other DNA
agtaacatatgatctaatga

SEQ ID NO: 30142 - DNA, 20 bp, synthetic construct
  source 1..20: mol_type = other DNA
agaataatagcaacaaccga

SEQ ID NO: 30143 - DNA, 20 bp, synthetic construct
  source 1..20: mol_type = other DNA
ggaatcaaacctcgctacac

SEQ ID NO: 30144 - DNA, 20 bp, synthetic construct
  source 1..20: mol_type = other DNA
ctgtggtaaaaacagaaggg

SEQ ID NO: 30145 - DNA, 20 bp, synthetic construct
  source 1..20: mol_type = other DNA
tcagattgggagtagtccct

SEQ ID NO: 30146 - DNA, 20 bp, synthetic construct
  source 1..20: mol_type = other DNA
attcattgggcaacccacag

SEQ ID NO: 30147 - DNA, 20 bp, synthetic construct
  source 1..20: mol_type = other DNA
agtgggtgatgtaacaatcg

SEQ ID NO: 30148 - DNA, 20 bp, synthetic construct
  source 1..20: mol_type = other DNA
acctctgtgaaagccaacag

SEQ ID NO: 30149 - DNA, 20 bp, synthetic construct
  source 1..20: mol_type = other DNA
atacttaccaatatgggatg

SEQ ID NO: 30150 - DNA, 20 bp, synthetic construct
  source 1..20: mol_type = other DNA
tgaggtaaggaatcccttcg

SEQ ID NO: 30151 - DNA, 20 bp, synthetic construct
  source 1..20: mol_type = other DNA
caatcgtggtgaataatgct

SEQ ID NO: 30152 - DNA, 20 bp, synthetic construct
  source 1..20: mol_type = other DNA
gcagctgagtgccgaaaact

SEQ ID NO: 30153 - DNA, 20 bp, synthetic construct
  source 1..20: mol_type = other DNA
cgtcactgcgcatgcgtatg

SEQ ID NO: 30154 - DNA, 20 bp, synthetic construct
  source 1..20: mol_type = other DNA
cttcaccaacgactccaagt

SEQ ID NO: 30155 - DNA, 20 bp, synthetic construct
  source 1..20: mol_type = other DNA
gagctgggcatggaataggc

SEQ ID NO: 30156 - DNA, 20 bp, synthetic construct
  source 1..20: mol_type = other DNA
agccgatcttctcagcacca

SEQ ID NO: 30157 - DNA, 20 bp, synthetic construct
  source 1..20: mol_type = other DNA
agaggagaaaatctgtggct

SEQ ID NO: 30158 - DNA, 20 bp, synthetic construct
  source 1..20: mol_type = other DNA
ttggtgctgagaagatcggc

SEQ ID NO: 30159 - DNA, 20 bp, synthetic construct
  source 1..20: mol_type = other DNA
ctgaagccactgtgacgatg

SEQ ID NO: 30160 - DNA, 20 bp, synthetic construct
  source 1..20: mol_type = other DNA
ctaattacagcgcggtgtgg

SEQ ID NO: 30161 - DNA, 20 bp, synthetic construct
  source 1..20: mol_type = other DNA
gtcacagtggcttcagtgtg

SEQ ID NO: 30162 - DNA, 20 bp, synthetic construct
  source 1..20: mol_type = other DNA
gagcgggcagtagtctgggt

SEQ ID NO: 30163 - DNA, 20 bp, synthetic construct
  source 1..20: mol_type = other DNA
atggagatgagcacgaggcg

SEQ ID NO: 30164 - DNA, 20 bp, synthetic construct
  source 1..20: mol_type = other DNA
gtggcaatgaggcagctaag

SEQ ID NO: 30165 - DNA, 20 bp, synthetic construct
  source 1..20: mol_type = other DNA
ggaaattctgatcaagagtg

SEQ ID NO: 30166 - DNA, 20 bp, synthetic construct
  source 1..20: mol_type = other DNA
gaaaactgaagcgtatagat

SEQ ID NO: 30167 - DNA, 20 bp, synthetic construct
  source 1..20: mol_type = other DNA
gattaaggaagatggacaca

SEQ ID NO: 30168 - DNA, 20 bp, synthetic construct
  source 1..20: mol_type = other DNA
cacgaggcgaggctcctgtc

SEQ ID NO: 30169 - DNA, 20 bp, synthetic construct
  source 1..20: mol_type = other DNA
catctgtcatgatcaggagc

SEQ ID NO: 30170 - DNA, 20 bp, synthetic construct
  source 1..20: mol_type = other DNA
gatcttcagggctccagaca

SEQ ID NO: 30171 - DNA, 20 bp, synthetic construct
  source 1..20: mol_type = other DNA
aagcggaacacctgcagttg

SEQ ID NO: 30172 - DNA, 20 bp, synthetic construct
  source 1..20: mol_type = other DNA
aggcagagactgtggcaatg

SEQ ID NO: 30173 - DNA, 20 bp, synthetic construct
  source 1..20: mol_type = other DNA
gtagatccagagcttcgcca

SEQ ID NO: 30174 - DNA, 20 bp, synthetic construct
  source 1..20: mol_type = other DNA
tgtctggagccctgaagatc

SEQ ID NO: 30175 - DNA, 20 bp, synthetic construct
  source 1..20: mol_type = other DNA
aggctgagtgcacggccatg

SEQ ID NO: 30176 - DNA, 20 bp, synthetic construct
  source 1..20: mol_type = other DNA
gatcatgacagatgcctccc

SEQ ID NO: 30177 - DNA, 20 bp, synthetic construct
  source 1..20: mol_type = other DNA
tggacgtagacgagcaccgc

SEQ ID NO: 30178 - DNA, 20 bp, synthetic construct
  source 1..20: mol_type = other DNA
gcggcgacgacaccatgaag

SEQ ID NO: 30179 - DNA, 20 bp, synthetic construct
  source 1..20: mol_type = other DNA
aggaactaatggtaacacgg

SEQ ID NO: 30180 - DNA, 20 bp, synthetic construct
  source 1..20: mol_type = other DNA
tgatccgggagtatcacaag

SEQ ID NO: 30181 - DNA, 20 bp, synthetic construct
  source 1..20: mol_type = other DNA
gccctgactctggctaaagg

SEQ ID NO: 30182 - DNA, 20 bp, synthetic construct
  source 1..20: mol_type = other DNA
gggtgcacaaaagttaaccg

SEQ ID NO: 30183 - DNA, 20 bp, synthetic construct
  source 1..20: mol_type = other DNA
aagcggtgatcatgacgtca

SEQ ID NO: 30184 - DNA, 20 bp, synthetic construct
  source 1..20: mol_type = other DNA
aaacctgtatccttgactgg

SEQ ID NO: 30185 - DNA, 20 bp, synthetic construct
  source 1..20: mol_type = other DNA
tctgagggaccgaagtccgt

SEQ ID NO: 30186 - DNA, 20 bp, synthetic construct
  source 1..20: mol_type = other DNA
catgactttggcctacaggt

SEQ ID NO: 30187 - DNA, 20 bp, synthetic construct
  source 1..20: mol_type = other DNA
gctacagcagcacaaggatg

SEQ ID NO: 30188 - DNA, 20 bp, synthetic construct
  source 1..20: mol_type = other DNA
tgagcgaggcgtcgatggac

SEQ ID NO: 30189 - DNA, 20 bp, synthetic construct
  source 1..20: mol_type = other DNA
tttgggttacctatttcccg

SEQ ID NO: 30190 - DNA, 20 bp, synthetic construct
  source 1..20: mol_type = other DNA
tcaagggcctgaagctacag

SEQ ID NO: 30191 - DNA, 20 bp, synthetic construct
  source 1..20: mol_type = other DNA
acgtgccagacctacagctt

SEQ ID NO: 30192 - DNA, 20 bp, synthetic construct
  source 1..20: mol_type = other DNA
tcatatactcctatgaaagg

SEQ ID NO: 30193 - DNA, 20 bp, synthetic construct
  source 1..20: mol_type = other DNA
atatagaaatcatcaagatg

SEQ ID NO: 30194 - DNA, 20 bp, synthetic construct
  source 1..20: mol_type = other DNA
aaatctgtcaaaccatacat

SEQ ID NO: 30195 - DNA, 20 bp, synthetic construct
  source 1..20: mol_type = other DNA
gctgtatcgtgtcgccggca

SEQ ID NO: 30196 - DNA, 20 bp, synthetic construct
  source 1..20: mol_type = other DNA
agatcatatactcctatgaa

SEQ ID NO: 30197 - DNA, 20 bp, synthetic construct
  source 1..20: mol_type = other DNA
ttaggaggattctctatggg

SEQ ID NO: 30198 - DNA, 20 bp, synthetic construct
  source 1..20: mol_type = other DNA
attctctatgggaggatgca

SEQ ID NO: 30199 - DNA, 20 bp, synthetic construct
  source 1..20: mol_type = other DNA
aaggaggaatctccaatgta

SEQ ID NO: 30200 - DNA, 20 bp, synthetic construct
  source 1..20: mol_type = other DNA
taaattactgcatacctggg

SEQ ID NO: 30201 - DNA, 20 bp, synthetic construct
  source 1..20: mol_type = other DNA
ctggacaaggattaagaatg

SEQ ID NO: 30202 - DNA, 20 bp, synthetic construct
  source 1..20: mol_type = other DNA
attgatgaagaagtaaaaag

SEQ ID NO: 30203 - DNA, 20 bp, synthetic construct
  source 1..20: mol_type = other DNA
ctgatcttcctgcatggctc

SEQ ID NO: 30204 - DNA, 20 bp, synthetic construct
  source 1..20: mol_type = other DNA
gcatacctgggaggagctgt

SEQ ID NO: 30205 - DNA, 20 bp, synthetic construct
  source 1..20: mol_type = other DNA
gccatgcaggaagatcagag

SEQ ID NO: 30206 - DNA, 20 bp, synthetic construct
  source 1..20: mol_type = other DNA
tcatcaggtgattctggaca

SEQ ID NO: 30207 - DNA, 20 bp, synthetic construct
  source 1..20: mol_type = other DNA
gacgagccgccagaagtgta

SEQ ID NO: 30208 - DNA, 20 bp, synthetic construct
  source 1..20: mol_type = other DNA
tatcttgggtatcttagagg

SEQ ID NO: 30209 - DNA, 20 bp, synthetic construct
  source 1..20: mol_type = other DNA
gccgcgaccccaggaaaccg

SEQ ID NO: 30210 - DNA, 20 bp, synthetic construct
  source 1..20: mol_type = other DNA
aaactgcaagaataaggacc

SEQ ID NO: 30211 - DNA, 20 bp, synthetic construct
  source 1..20: mol_type = other DNA
aactgtcaggagcatacaag

SEQ ID NO: 30212 - DNA, 20 bp, synthetic construct
  source 1..20: mol_type = other DNA
gccaaagaaaggtccccggt

SEQ ID NO: 30213 - DNA, 20 bp, synthetic construct
  source 1..20: mol_type = other DNA
gaggcaagagcagctatcag

SEQ ID NO: 30214 - DNA, 20 bp, synthetic construct
  source 1..20: mol_type = other DNA
ccggtccgattctgcgaaag

SEQ ID NO: 30215 - DNA, 20 bp, synthetic construct
  source 1..20: mol_type = other DNA
gcgcgtactaccttcggtct

SEQ ID NO: 30216 - DNA, 20 bp, synthetic construct
  source 1..20: mol_type = other DNA
agaactcctccgtcgcgcca

SEQ ID NO: 30217 - DNA, 20 bp, synthetic construct
  source 1..20: mol_type = other DNA
caacttaagaataagtacca

SEQ ID NO: 30218 - DNA, 20 bp, synthetic construct
  source 1..20: mol_type = other DNA
aggatatcaaaaaactcccc

SEQ ID NO: 30219 - DNA, 20 bp, synthetic construct
  source 1..20: mol_type = other DNA
attgaccttctgttggacac

SEQ ID NO: 30220 - DNA, 20 bp, synthetic construct
  source 1..20: mol_type = other DNA
gacggaggagttctgtacgc

SEQ ID NO: 30221 - DNA, 20 bp, synthetic construct
  source 1..20: mol_type = other DNA
atattgactagatgatctgg

SEQ ID NO: 30222 - DNA, 20 bp, synthetic construct
  source 1..20: mol_type = other DNA
tgatgcgggaataccacaag

SEQ ID NO: 30223 - DNA, 20 bp, synthetic construct
  source 1..20: mol_type = other DNA
gggtcacgaagccacacacg

SEQ ID NO: 30224 - DNA, 20 bp, synthetic construct
  source 1..20: mol_type = other DNA
ccaggctcaagcactcgaag

SEQ ID NO: 30225 - DNA, 20 bp, synthetic construct
  source 1..20: mol_type = other DNA
gcaggctccgaataccccaa

SEQ ID NO: 30226 - DNA, 20 bp, synthetic construct
  source 1..20: mol_type = other DNA
agtgtggggtcgatactgcg

SEQ ID NO: 30227 - DNA, 20 bp, synthetic construct
  source 1..20: mol_type = other DNA
ctactggaagcggcgcatcg

SEQ ID NO: 30228 - DNA, 20 bp, synthetic construct
  source 1..20: mol_type = other DNA
catgtcagcattgccgacgt

SEQ ID NO: 30229 - DNA, 20 bp, synthetic construct
  source 1..20: mol_type = other DNA
ggcctgaggctgatgcgcac

SEQ ID NO: 30230 - DNA, 20 bp, synthetic construct
  source 1..20: mol_type = other DNA
ccactcacactggatatacc

SEQ ID NO: 30231 - DNA, 20 bp, synthetic construct
  source 1..20: mol_type = other DNA
agggtgctggatacaagtgg

SEQ ID NO: 30232 - DNA, 20 bp, synthetic construct
  source 1..20: mol_type = other DNA
gctgaagagggagtcaacca

SEQ ID NO: 30233 - DNA, 20 bp, synthetic construct
  source 1..20: mol_type = other DNA
ttcctgaagaccccaagccc

SEQ ID NO: 30234 - DNA, 20 bp, synthetic construct
  source 1..20: mol_type = other DNA
tgtcggacaaaaagcaattg

SEQ ID NO: 30235 - DNA, 20 bp, synthetic construct
  source 1..20: mol_type = other DNA
tgtttgcaccattgctccgg

SEQ ID NO: 30236 - DNA, 20 bp, synthetic construct
  source 1..20: mol_type = other DNA
cgaagggccggactgagtca

SEQ ID NO: 30237 - DNA, 20 bp, synthetic construct
  source 1..20: mol_type = other DNA
gataggtacatatcaaacca

SEQ ID NO: 30238 - DNA, 20 bp, synthetic construct
  source 1..20: mol_type = other DNA
ccaggggatacgcattgacc

SEQ ID NO: 30239 - DNA, 20 bp, synthetic construct
  source 1..20: mol_type = other DNA
gcagcatattgtgggacaag

SEQ ID NO: 30240 - DNA, 20 bp, synthetic construct
  source 1..20: mol_type = other DNA
taaaggatttatcaaaccag

SEQ ID NO: 30241 - DNA, 20 bp, synthetic construct
  source 1..20: mol_type = other DNA
aactggccatcattcaagag

SEQ ID NO: 30242 - DNA, 20 bp, synthetic construct
  source 1..20: mol_type = other DNA
caccccaagagtgctcaaag

SEQ ID NO: 30243 - DNA, 20 bp, synthetic construct
  source 1..20: mol_type = other DNA
tcactggtcaggtatgccag

SEQ ID NO: 30244 - DNA, 20 bp, synthetic construct
  source 1..20: mol_type = other DNA
tgtgagcccctcggaaatcc

SEQ ID NO: 30245 - DNA, 20 bp, synthetic construct
  source 1..20: mol_type = other DNA
gtataatgaccagctcaccc

SEQ ID NO: 30246 - DNA, 20 bp, synthetic construct
  source 1..20: mol_type = other DNA
ctgtcctggtagtgcatggt

SEQ ID NO: 30247 - DNA, 20 bp, synthetic construct
  source 1..20: mol_type = other DNA
tggattaaagttcagaacaa

SEQ ID NO: 30248 - DNA, 20 bp, synthetic construct
  source 1..20: mol_type = other DNA
gctgatgagtagtggcaatg

SEQ ID NO: 30249 - DNA, 20 bp, synthetic construct
  source 1..20: mol_type = other DNA
taccactgactctactgtca

SEQ ID NO: 30250 - DNA, 20 bp, synthetic construct
  source 1..20: mol_type = other DNA
aaagcgtatgagtctcttga

SEQ ID NO: 30251 - DNA, 20 bp, synthetic construct
  source 1..20: mol_type = other DNA
cacctcctggtcctaaggaa

SEQ ID NO: 30252 - DNA, 20 bp, synthetic construct
  source 1..20: mol_type = other DNA
ctgccagtttcgctccgtgg

SEQ ID NO: 30253 - DNA, 20 bp, synthetic construct
  source 1..20: mol_type = other DNA
acagatgtgatcttaactgt

SEQ ID NO: 30254 - DNA, 20 bp, synthetic construct
  source 1..20: mol_type = other DNA
tatgagacatccccactgca

SEQ ID NO: 30255 - DNA, 20 bp, synthetic construct
  source 1..20: mol_type = other DNA
ctatagccatcaggtttggg

SEQ ID NO: 30256 - DNA, 20 bp, synthetic construct
  source 1..20: mol_type = other DNA
tacttgtaatctgcaaccac

SEQ ID NO: 30257 - DNA, 20 bp, synthetic construct
  source 1..20: mol_type = other DNA
gcagtggggatgtctcataa

SEQ ID NO: 30258 - DNA, 20 bp, synthetic construct
  source 1..20: mol_type = other DNA
gcagccctgaaagatgcgga

SEQ ID NO: 30259 - DNA, 20 bp, synthetic construct
  source 1..20: mol_type = other DNA
cgctgaccaaagcaaaggcg

SEQ ID NO: 30260 - DNA, 20 bp, synthetic construct
  source 1..20: mol_type = other DNA
agtgaagggcttgatatcaa

SEQ ID NO: 30261 - DNA, 20 bp, synthetic construct
  source 1..20: mol_type = other DNA
gtcttctcagaataataagg

SEQ ID NO: 30262 - DNA, 20 bp, synthetic construct
  source 1..20: mol_type = other DNA
tatggagttcatgcttgtga

SEQ ID NO: 30263 - DNA, 20 bp, synthetic construct
  source 1..20: mol_type = other DNA
ggagaagtcaacagtagtga

SEQ ID NO: 30264 - DNA, 20 bp, synthetic construct
  source 1..20: mol_type = other DNA
attcagctggtcgatatcac

SEQ ID NO: 30265 - DNA, 20 bp, synthetic construct
  source 1..20: mol_type = other DNA
aatggaatgtcttcgtaatg

SEQ ID NO: 30266 - DNA, 20 bp, synthetic construct
  source 1..20: mol_type = other DNA
atccagagtccgctgacctc

SEQ ID NO: 30267 - DNA, 20 bp, synthetic construct
  source 1..20: mol_type = other DNA
aagagggtgaggatacactg

SEQ ID NO: 30268 - DNA, 20 bp, synthetic construct
  source 1..20: mol_type = other DNA
taagaccacaggcagagtgt

SEQ ID NO: 30269 - DNA, 20 bp, synthetic construct
  source 1..20: mol_type = other DNA
tctgccacaggaaggaactc

SEQ ID NO: 30270 - DNA, 20 bp, synthetic construct
  source 1..20: mol_type = other DNA
agctgctgtaaatatgatgg

SEQ ID NO: 30271 - DNA, 20 bp, synthetic construct
  source 1..20: mol_type = other DNA
aaggaagcgagtgacggaac

SEQ ID NO: 30272 - DNA, 20 bp, synthetic construct
  source 1..20: mol_type = other DNA
ccaggacgacaagaatcaca

SEQ ID NO: 30273 - DNA, 20 bp, synthetic construct
  source 1..20: mol_type = other DNA
accacctactacagactccc

SEQ ID NO: 30274 - DNA, 20 bp, synthetic construct
  source 1..20: mol_type = other DNA
atatttacagcagctcggga

SEQ ID NO: 30275 - DNA, 20 bp, synthetic construct
  source 1..20: mol_type = other DNA
cattctccaagtgacaaggt

SEQ ID NO: 30276 - DNA, 20 bp, synthetic construct
  source 1..20: mol_type = other DNA
gtcactcgcttccttaggga

SEQ ID NO: 30277 - DNA, 20 bp, synthetic construct
  source 1..20: mol_type = other DNA
ggaagagcagatgcacactt

SEQ ID NO: 30278 - DNA, 20 bp, synthetic construct
  source 1..20: mol_type = other DNA
cagtggggttggaagcattg

SEQ ID NO: 30279 - DNA, 20 bp, synthetic construct
  source 1..20: mol_type = other DNA
agaaattaaagagaatgcac

SEQ ID NO: 30280 - DNA, 20 bp, synthetic construct
  source 1..20: mol_type = other DNA
agtgcccaaaaatccagctt

SEQ ID NO: 30281 - DNA, 20 bp, synthetic construct
  source 1..20: mol_type = other DNA
gtccagatgaagcaaatgtg

SEQ ID NO: 30282 - DNA, 20 bp, synthetic construct
  source 1..20: mol_type = other DNA
cacatcgtcgtgtaccatcg

SEQ ID NO: 30283 - DNA, 20 bp, synthetic construct
  source 1..20: mol_type = other DNA
gctcagtgaacatccacccg

SEQ ID NO: 30284 - DNA, 20 bp, synthetic construct
  source 1..20: mol_type = other DNA
accacgataagccaactgga

SEQ ID NO: 30285 - DNA, 20 bp, synthetic construct
  source 1..20: mol_type = other DNA
acatctacctccgaggacga

SEQ ID NO: 30286 - DNA, 20 bp, synthetic construct
  source 1..20: mol_type = other DNA
tacacggccgatgttacgac

SEQ ID NO: 30287 - DNA, 20 bp, synthetic construct
  source 1..20: mol_type = other DNA
gtcttggaccaagattacag

SEQ ID NO: 30288 - DNA, 20 bp, synthetic construct
  source 1..20: mol_type = other DNA
ctgggcagatgcgccgatcg

SEQ ID NO: 30289 - DNA, 20 bp, synthetic construct
  source 1..20: mol_type = other DNA
gtccagccagacgaagaacg

SEQ ID NO: 30290 - DNA, 20 bp, synthetic construct
  source 1..20: mol_type = other DNA
ttgcaattattcctaacgag

SEQ ID NO: 30291 - DNA, 20 bp, synthetic construct
  source 1..20: mol_type = other DNA
cccactaggtgagcgactgg

SEQ ID NO: 30292 - DNA, 20 bp, synthetic construct
  source 1..20: mol_type = other DNA
cactttcagggagtagcgca

SEQ ID NO: 30293 - DNA, 20 bp, synthetic construct
  source 1..20: mol_type = other DNA
gaacagcaactattatgcca

SEQ ID NO: 30294 - DNA, 20 bp, synthetic construct
  source 1..20: mol_type = other DNA
aggatacagaagtgaagacc

SEQ ID NO: 30295 - DNA, 20 bp, synthetic construct
  source 1..20: mol_type = other DNA
agcggagcagagtggaatcg

SEQ ID NO: 30296 - DNA, 20 bp, synthetic construct
  source 1..20: mol_type = other DNA
gaggatcctggacaatacct

SEQ ID NO: 30297 - DNA, 20 bp, synthetic construct
  source 1..20: mol_type = other DNA
ccgtcatgagacccgactgg

SEQ ID NO: 30298 - DNA, 20 bp, synthetic construct
  source 1..20: mol_type = other DNA
gcctaccgcaagctcttgga

SEQ ID NO: 30299 - DNA, 20 bp, synthetic construct
  source 1..20: mol_type = other DNA
ggagctcaatgatcgcttgg

SEQ ID NO: 30300 - DNA, 20 bp, synthetic construct
  source 1..20: mol_type = other DNA
tcgctggaaacggagaacgc

SEQ ID NO: 30301 - DNA, 20 bp, synthetic construct
  source 1..20: mol_type = other DNA
tcgcatcaccgagtctgaag

SEQ ID NO: 30302 - DNA, 20 bp, synthetic construct
  source 1..20: mol_type = other DNA
gtgagcgggacaccagccgg

SEQ ID NO: 30303 - DNA, 20 bp, synthetic construct
  source 1..20: mol_type = other DNA
ggagaagacttattctgcca

SEQ ID NO: 30304 - DNA, 20 bp, synthetic construct
  source 1..20: mol_type = other DNA
agcagcgtgagtttgagagc

SEQ ID NO: 30305 - DNA, 20 bp, synthetic construct
  source 1..20: mol_type = other DNA
ccaggtggagcagtataaga

SEQ ID NO: 30306 - DNA, 20 bp, synthetic construct
  source 1..20: mol_type = other DNA
ttgcttcttggcctcaccta

SEQ ID NO: 30307 - DNA, 20 bp, synthetic construct
  source 1..20: mol_type = other DNA
cgcctacgaggccgagctcg

SEQ ID NO: 30308 - DNA, 20 bp, synthetic construct
  source 1..20: mol_type = other DNA
ccagaagaacatctacagtg

SEQ ID NO: 30309 - DNA, 20 bp, synthetic construct
  source 1..20: mol_type = other DNA
agtttaaggagctgaaagcg

SEQ ID NO: 30310 - DNA, 20 bp, synthetic construct
  source 1..20: mol_type = other DNA
ccgtttccagcgagcgcaca

SEQ ID NO: 30311 - DNA, 20 bp, synthetic construct
  source 1..20: mol_type = other DNA
ggaactgcgggcccagcatg

SEQ ID NO: 30312 - DNA, 20 bp, synthetic construct
  source 1..20: mol_type = other DNA
tgctcggccccaaaccaccc

SEQ ID NO: 30313 - DNA, 20 bp, synthetic construct
  source 1..20: mol_type = other DNA
tacctgacatccattcacaa

SEQ ID NO: 30314 - DNA, 20 bp, synthetic construct
  source 1..20: mol_type = other DNA
cttggatcagatatcaaggt

SEQ ID NO: 30315 - DNA, 20 bp, synthetic construct
  source 1..20: mol_type = other DNA
actgcagggaatgcatcggt

SEQ ID NO: 30316 - DNA, 20 bp, synthetic construct
  source 1..20: mol_type = other DNA
aagatggaactgttactgca

SEQ ID NO: 30317 - DNA, 20 bp, synthetic construct
  source 1..20: mol_type = other DNA
tagcagtgaagtctttcaga

SEQ ID NO: 30318 - DNA, 20 bp, synthetic construct
  source 1..20: mol_type = other DNA
tgagactttgccagcagaca

SEQ ID NO: 30319 - DNA, 20 bp, synthetic construct
  source 1..20: mol_type = other DNA
gattatgggcaatgtcctgc

SEQ ID NO: 30320 - DNA, 20 bp, synthetic construct
  source 1..20: mol_type = other DNA
ttgtgaatggatgtcaggta

SEQ ID NO: 30321 - DNA, 20 bp, synthetic construct
  source 1..20: mol_type = other DNA
atatatttggcaaggcatgt

SEQ ID NO: 30322 - DNA, 20 bp, synthetic construct
  source 1..20: mol_type = other DNA
tcacagcagagatggaaagc

SEQ ID NO: 30323 - DNA, 20 bp, synthetic construct
  source 1..20: mol_type = other DNA
aagggtgtagctgatggtgc

SEQ ID NO: 30324 - DNA, 20 bp, synthetic construct
  source 1..20: mol_type = other DNA
cctattaatcgtgagagctg

SEQ ID NO: 30325 - DNA, 20 bp, synthetic construct
  source 1..20: mol_type = other DNA
ctcacgattaataggctctg

SEQ ID NO: 30326 - DNA, 20 bp, synthetic construct
  source 1..20: mol_type = other DNA
tcagcatgtccagctcccca

SEQ ID NO: 30327 - DNA, 20 bp, synthetic construct
  source 1..20: mol_type = other DNA
aaactacggcgggacatccg

SEQ ID NO: 30328 - DNA, 20 bp, synthetic construct
  source 1..20: mol_type = other DNA
gccgccgccaccgcgcacaa

SEQ ID NO: 30329 - DNA, 20 bp, synthetic construct
  source 1..20: mol_type = other DNA
cagccaccagaacactccag

SEQ ID NO: 30330 - DNA, 20 bp, synthetic construct
  source 1..20: mol_type = other DNA
atgcttgcccagttcaacac

SEQ ID NO: 30331 - DNA, 20 bp, synthetic construct
  source 1..20: mol_type = other DNA
ctagaataaactctcgacac

SEQ ID NO: 30332 - DNA, 20 bp, synthetic construct
  source 1..20: mol_type = other DNA
agctggaggtgctcgactgt

SEQ ID NO: 30333 - DNA, 20 bp, synthetic construct
  source 1..20: mol_type = other DNA
gattcgtgaacagaccacag

SEQ ID NO: 30334 - DNA, 20 bp, synthetic construct
  source 1..20: mol_type = other DNA
cgggtggaccagatggaagg

SEQ ID NO: 30335 - DNA, 20 bp, synthetic construct
  source 1..20: mol_type = other DNA
gtggcattggatgagtggcg

SEQ ID NO: 30336 - DNA, 20 bp, synthetic construct
  source 1..20: mol_type = other DNA
caagactcgtccaatacagg

SEQ ID NO: 30337 - DNA, 20 bp, synthetic construct
  source 1..20: mol_type = other DNA
agctggcgacacgtgaagac

SEQ ID NO: 30338 - DNA, 20 bp, synthetic construct
  source 1..20: mol_type = other DNA
gctctcggagattctcacca

SEQ ID NO: 30339 - DNA, 20 bp, synthetic construct
  source 1..20: mol_type = other DNA
ttacctagtaaaaggaagag

SEQ ID NO: 30340 - DNA, 20 bp, synthetic construct
  source 1..20: mol_type = other DNA
cacgacagcatgcaccctgg

SEQ ID NO: 30341 - DNA, 20 bp, synthetic construct
  source 1..20: mol_type = other DNA
caagcatgcatagaacacag

SEQ ID NO: 30342 - DNA, 20 bp, synthetic construct
  source 1..20: mol_type = other DNA
ttgaagtgctatccaactgg

SEQ ID NO: 30343 - DNA, 20 bp, synthetic construct
  source 1..20: mol_type = other DNA
taccttaagcaatctaatcg

SEQ ID NO: 30344 - DNA, 20 bp, synthetic construct
  source 1..20: mol_type = other DNA
tccttacctacacctatgtg

SEQ ID NO: 30345 - DNA, 20 bp, synthetic construct
  source 1..20: mol_type = other DNA
tctagcctaacaaagcggga

SEQ ID NO: 30346 - DNA, 20 bp, synthetic construct
  source 1..20: mol_type = other DNA
gcaaaagataccatatgctc

SEQ ID NO: 30347 - DNA, 20 bp, synthetic construct
  source 1..20: mol_type = other DNA
gcacttcaatcaccagttcg

SEQ ID NO: 30348 - DNA, 20 bp, synthetic construct
  source 1..20: mol_type = other DNA
catggagcaccgactaacta

SEQ ID NO: 30349 - DNA, 20 bp, synthetic construct
  source 1..20: mol_type = other DNA
ccccttccggacgggacccg

SEQ ID NO: 30350 - DNA, 20 bp, synthetic construct
  source 1..20: mol_type = other DNA
gaggggcgacgcccacgacc

SEQ ID NO: 30351 - DNA, 20 bp, synthetic construct
  source 1..20: mol_type = other DNA
gtgcagaagaagagcagagt

SEQ ID NO: 30352 - DNA, 20 bp, synthetic construct
  source 1..20: mol_type = other DNA
gggtacatctaaagccctgc

SEQ ID NO: 30353 - DNA, 20 bp, synthetic construct
  source 1..20: mol_type = other DNA
agatgtacccagtgacataa

SEQ ID NO: 30354 - DNA, 20 bp, synthetic construct
  source 1..20: mol_type = other DNA
aatggagaacagcatagctc

SEQ ID NO: 30355 - DNA, 20 bp, synthetic construct
  source 1..20: mol_type = other DNA
gctcaaaaagggtccagctg

SEQ ID NO: 30356 - DNA, 20 bp, synthetic construct
  source 1..20: mol_type = other DNA
aggtgtgtggcgctgcccag

SEQ ID NO: 30357 - DNA, 20 bp, synthetic construct
  source 1..20: mol_type = other DNA
gtgaaatacggagtgaatcc

SEQ ID NO: 30358 - DNA, 20 bp, synthetic construct
  source 1..20: mol_type = other DNA
acctctgcaggcattaacta

SEQ ID NO: 30359 - DNA, 20 bp, synthetic construct
  source 1..20: mol_type = other DNA
gagggtcaagaagaactcca

SEQ ID NO: 30360 - DNA, 20 bp, synthetic construct
  source 1..20: mol_type = other DNA
gccttaatccaggaacaacc

SEQ ID NO: 30361 - DNA, 20 bp, synthetic construct
  source 1..20: mol_type = other DNA
agatacagtgacaatgaaga

SEQ ID NO: 30362 - DNA, 20 bp, synthetic construct
  source 1..20: mol_type = other DNA
tctgctgaagaagaaattgt

SEQ ID NO: 30363 - DNA, 20 bp, synthetic construct
  source 1..20: mol_type = other DNA
actgagactgaatggacaag

SEQ ID NO: 30364 - DNA, 20 bp, synthetic construct
  source 1..20: mol_type = other DNA
ccgcgtccttaccctgccga

SEQ ID NO: 30365 - DNA, 20 bp, synthetic construct
  source 1..20: mol_type = other DNA
acaagtggatcttcaaaagg

SEQ ID NO: 30366 - DNA, 20 bp, synthetic construct
  source 1..20: mol_type = other DNA
aacaatgtgacgctgccggc

SEQ ID NO: 30367 - DNA, 20 bp, synthetic construct
  source 1..20: mol_type = other DNA
tgagaagagagaaccactaa

SEQ ID NO: 30368 - DNA, 20 bp, synthetic construct
  source 1..20: mol_type = other DNA
cgaagagcgcgagcccaccc

SEQ ID NO: 30369 - DNA, 20 bp, synthetic construct
  source 1..20: mol_type = other DNA
gcggccggttgcgagccgtg

SEQ ID NO: 30370 - DNA, 20 bp, synthetic construct
  source 1..20: mol_type = other DNA
tcgtcactggagaagtccgg

SEQ ID NO: 30371 - DNA, 20 bp, synthetic construct
  source 1..20: mol_type = other DNA
tgctcggctccggcccgcgg

SEQ ID NO: 30372 - DNA, 20 bp, synthetic construct
  source 1..20: mol_type = other DNA
gcaatgacgaagaataacca

SEQ ID NO: 30373 - DNA, 20 bp, synthetic construct
  source 1..20: mol_type = other DNA
aggaataaaaagcttcacga

SEQ ID NO: 30374 - DNA, 20 bp, synthetic construct
  source 1..20: mol_type = other DNA
tgtaatcagcacgatttcgc

SEQ ID NO: 30375 - DNA, 20 bp, synthetic construct
  source 1..20: mol_type = other DNA
aaactatttgtagactacaa

SEQ ID NO: 30376 - DNA, 20 bp, synthetic construct
  source 1..20: mol_type = other DNA
taccacaaaggtatgaacct

SEQ ID NO: 30377 - DNA, 20 bp, synthetic construct
  source 1..20: mol_type = other DNA
ataccagtaagccagtaaga

SEQ ID NO: 30378 - DNA, 20 bp, synthetic construct
  source 1..20: mol_type = other DNA
ccacagtgacaatatggcca

SEQ ID NO: 30379 - DNA, 20 bp, synthetic construct
  source 1..20: mol_type = other DNA
accagtaagccagtaagaag

SEQ ID NO: 30380 - DNA, 20 bp, synthetic construct
  source 1..20: mol_type = other DNA
tcgtgctgattacaggagct

SEQ ID NO: 30381 - DNA, 20 bp, synthetic construct
  source 1..20: mol_type = other DNA
gttgctgcagtctaccacaa

SEQ ID NO: 30382 - DNA, 20 bp, synthetic construct
  source 1..20: mol_type = other DNA
taccagtaagccagtaagaa

SEQ ID NO: 30383 - DNA, 20 bp, synthetic construct
  source 1..20: mol_type = other DNA
ccatggccatattgtcactg

SEQ ID NO: 30384 - DNA, 20 bp, synthetic construct
  source 1..20: mol_type = other DNA
ggaaacagctgccaaatgca

SEQ ID NO: 30385 - DNA, 20 bp, synthetic construct
  source 1..20: mol_type = other DNA
ctgattacaggagctgggca

SEQ ID NO: 30386 - DNA, 20 bp, synthetic construct
  source 1..20: mol_type = other DNA
aagaggagaaaatcagtcac

SEQ ID NO: 30387 - DNA, 20 bp, synthetic construct
  source 1..20: mol_type = other DNA
gatctgaacgtagtaatgaa

SEQ ID NO: 30388 - DNA, 20 bp, synthetic construct
  source 1..20: mol_type = other DNA
ttacctgtatagtgagacct

SEQ ID NO: 30389 - DNA, 20 bp, synthetic construct
  source 1..20: mol_type = other DNA
gctttactaactagccccag

SEQ ID NO: 30390 - DNA, 20 bp, synthetic construct
  source 1..20: mol_type = other DNA
cgcctccatccacaagattg

SEQ ID NO: 30391 - DNA, 20 bp, synthetic construct
  source 1..20: mol_type = other DNA
aatatgttggctccttatgc

SEQ ID NO: 30392 - DNA, 20 bp, synthetic construct
  source 1..20: mol_type = other DNA
ctatattgaccgaatagaag

SEQ ID NO: 30393 - DNA, 20 bp, synthetic construct
  source 1..20: mol_type = other DNA
aaagcttaccttgttccaca

SEQ ID NO: 30394 - DNA, 20 bp, synthetic construct
  source 1..20: mol_type = other DNA
tcagtttgtagtgttgtcta

SEQ ID NO: 30395 - DNA, 20 bp, synthetic construct
  source 1..20: mol_type = other DNA
gtaaacttcctgaagtgtgt

SEQ ID NO: 30396 - DNA, 20 bp, synthetic construct
  source 1..20: mol_type = other DNA
agcagagaagattgcacaag

SEQ ID NO: 30397 - DNA, 20 bp, synthetic construct
  source 1..20: mol_type = other DNA
tgtggatggaggcgtagagc

SEQ ID NO: 30398 - DNA, 20 bp, synthetic construct
  source 1..20: mol_type = other DNA
acctgtagtacacagccaga

SEQ ID NO: 30399 - DNA, 20 bp, synthetic construct
  source 1..20: mol_type = other DNA
agaactggttcagctcatgg

SEQ ID NO: 30400 - DNA, 20 bp, synthetic construct
  source 1..20: mol_type = other DNA
aatagaagtggttaatatgt

SEQ ID NO: 30401 - DNA, 20 bp, synthetic construct
  source 1..20: mol_type = other DNA
tgcacagaaacaaaaggttg

SEQ ID NO: 30402 - DNA, 20 bp, synthetic construct
  source 1..20: mol_type = other DNA
cattctgggtgacacgctgg

SEQ ID NO: 30403 - DNA, 20 bp, synthetic construct
  source 1..20: mol_type = other DNA
gaagattcggagccttgatg

SEQ ID NO: 30404 - DNA, 20 bp, synthetic construct
  source 1..20: mol_type = other DNA
cagatggtgtactgatgacc

SEQ ID NO: 30405 - DNA, 20 bp, synthetic construct
  source 1..20: mol_type = other DNA
atggtgatggaatatgtctc

SEQ ID NO: 30406 - DNA, 20 bp, synthetic construct
  source 1..20: mol_type = other DNA
aggcaactgccaaaggatcc

SEQ ID NO: 30407 - DNA, 20 bp, synthetic construct
  source 1..20: mol_type = other DNA
ggtagatatatggagcagtg

SEQ ID NO: 30408 - DNA, 20 bp, synthetic construct
  source 1..20: mol_type = other DNA
cggcaccttcggcaaagtga

SEQ ID NO: 30409 - DNA, 20 bp, synthetic construct
  source 1..20: mol_type = other DNA
agaaggatttaaatattgag

SEQ ID NO: 30410 - DNA, 20 bp, synthetic construct
  source 1..20: mol_type = other DNA
ttattgtcacaggcatatgg

SEQ ID NO: 30411 - DNA, 20 bp, synthetic construct
  source 1..20: mol_type = other DNA
gacaataatccacaccagaa

SEQ ID NO: 30412 - DNA, 20 bp, synthetic construct
  source 1..20: mol_type = other DNA
taaggcttcatcatcaatca

SEQ ID NO: 30413 - DNA, 20 bp, synthetic construct
  source 1..20: mol_type = other DNA
catggtcatcatcaaatgga

SEQ ID NO: 30414 - DNA, 20 bp, synthetic construct
  source 1..20: mol_type = other DNA
tgcaggtggatcccatgaag

SEQ ID NO: 30415 - DNA, 20 bp, synthetic construct
  source 1..20: mol_type = other DNA
gaactatatgatggatcctc

SEQ ID NO: 30416 - DNA, 20 bp, synthetic construct
  source 1..20: mol_type = other DNA
gttatctattatgagatggt

SEQ ID NO: 30417 - DNA, 20 bp, synthetic construct
  source 1..20: mol_type = other DNA
tcacagcctcatcggagcgt

SEQ ID NO: 30418 - DNA, 20 bp, synthetic construct
  source 1..20: mol_type = other DNA
caggcagccgacaacagccg

SEQ ID NO: 30419 - DNA, 20 bp, synthetic construct
  source 1..20: mol_type = other DNA
ggaagaggacgcgaccgtcg

SEQ ID NO: 30420 - DNA, 20 bp, synthetic construct
  source 1..20: mol_type = other DNA
gttgacattgtactcggcgg

SEQ ID NO: 30421 - DNA, 20 bp, synthetic construct
  source 1..20: mol_type = other DNA
gagatgaggggagttcctcg

SEQ ID NO: 30422 - DNA, 20 bp, synthetic construct
  source 1..20: mol_type = other DNA
accatctcgggacctcaggt

SEQ ID NO: 30423 - DNA, 20 bp, synthetic construct
  source 1..20: mol_type = other DNA
gacattgatgccccccacga

SEQ ID NO: 30424 - DNA, 20 bp, synthetic construct
  source 1..20: mol_type = other DNA
ccctccgggagacctaccca

SEQ ID NO: 30425 - DNA, 20 bp, synthetic construct
  source 1..20: mol_type = other DNA
tacatcgaagcccacggcac

SEQ ID NO: 30426 - DNA, 20 bp, synthetic construct
  source 1..20: mol_type = other DNA
tccacactgagtcggccccg

SEQ ID NO: 30427 - DNA, 20 bp, synthetic construct
  source 1..20: mol_type = other DNA
gatgaacgtctaccgcgacg

SEQ ID NO: 30428 - DNA, 20 bp, synthetic construct
  source 1..20: mol_type = other DNA
caccaagcccaccacgcccg

SEQ ID NO: 30429 - DNA, 20 bp, synthetic construct
  source 1..20: mol_type = other DNA
gctccaccaagtccaacatg

SEQ ID NO: 30430 - DNA, 20 bp, synthetic construct
  source 1..20: mol_type = other DNA
tttgtgagcaccctcacccg

SEQ ID NO: 30431 - DNA, 20 bp, synthetic construct
  source 1..20: mol_type = other DNA
tgcagggcccagcatcgcac

SEQ ID NO: 30432 - DNA, 20 bp, synthetic construct
  source 1..20: mol_type = other DNA
ggctgtagcgatgctcactg

SEQ ID NO: 30433 - DNA, 20 bp, synthetic construct
  source 1..20: mol_type = other DNA
gtgctgctgatgaaatacct

SEQ ID NO: 30434 - DNA, 20 bp, synthetic construct
  source 1..20: mol_type = other DNA
gaaacagatcaacgattacg

SEQ ID NO: 30435 - DNA, 20 bp, synthetic construct
  source 1..20: mol_type = other DNA
ccggaggctcagatccatga

SEQ ID NO: 30436 - DNA, 20 bp, synthetic construct
  source 1..20: mol_type = other DNA
gaggaacaggccattgccgg

SEQ ID NO: 30437 - DNA, 20 bp, synthetic construct
  source 1..20: mol_type = other DNA
gggtactcaagggaaaattg

SEQ ID NO: 30438 - DNA, 20 bp, synthetic construct
  source 1..20: mol_type = other DNA
catcataggcaccttcacgg

SEQ ID NO: 30439 - DNA, 20 bp, synthetic construct
  source 1..20: mol_type = other DNA
tgacactcacgatgaaatcc

SEQ ID NO: 30440 - DNA, 20 bp, synthetic construct
  source 1..20: mol_type = other DNA
caacaagatcacccccaacc

SEQ ID NO: 30441 - DNA, 20 bp, synthetic construct
  source 1..20: mol_type = other DNA
caacctcacggagattccgg

SEQ ID NO: 30442 - DNA, 20 bp, synthetic construct
  source 1..20: mol_type = other DNA
cagctggcggtataggctga

SEQ ID NO: 30443 - DNA, 20 bp, synthetic construct
  source 1..20: mol_type = other DNA
aatggcctgttcctcagcga

SEQ ID NO: 30444 - DNA, 20 bp, synthetic construct
  source 1..20: mol_type = other DNA
tccctggctgaggatcccca

SEQ ID NO: 30445 - DNA, 20 bp, synthetic construct
  source 1..20: mol_type = other DNA
agaggacttccacgtggacc

SEQ ID NO: 30446 - DNA, 20 bp, synthetic construct
  source 1..20: mol_type = other DNA
tggacagcttcttacagtgc

SEQ ID NO: 30447 - DNA, 20 bp, synthetic construct
  source 1..20: mol_type = other DNA
aagtccatgagttaatcgag

SEQ ID NO: 30448 - DNA, 20 bp, synthetic construct
  source 1..20: mol_type = other DNA
ccagtcctgtcagtacacac

SEQ ID NO: 30449 - DNA, 20 bp, synthetic construct
  source 1..20: mol_type = other DNA
ctcctactatccgctgaccg

SEQ ID NO: 30450 - DNA, 20 bp, synthetic construct
  source 1..20: mol_type = other DNA
gggacttggaactctcgaga

SEQ ID NO: 30451 - DNA, 20 bp, synthetic construct
  source 1..20: mol_type = other DNA
tcgggctcgttaccacatga

SEQ ID NO: 30452 - DNA, 20 bp, synthetic construct
  source 1..20: mol_type = other DNA
aggctgattacgagtcattg

SEQ ID NO: 30453 - DNA, 20 bp, synthetic construct
  source 1..20: mol_type = other DNA
ggcagggtgattctcgctag

SEQ ID NO: 30454 - DNA, 20 bp, synthetic construct
  source 1..20: mol_type = other DNA
tatgtatgctaatagactcc

SEQ ID NO: 30455 - DNA, 20 bp, synthetic construct
  source 1..20: mol_type = other DNA
taactctgaggattgttccg

SEQ ID NO: 30456 - DNA, 20 bp, synthetic construct
  source 1..20: mol_type = other DNA
aaaccctaagattaatccgc

SEQ ID NO: 30457 - DNA, 20 bp, synthetic construct
  source 1..20: mol_type = other DNA
tgtatgtgcatcgatggtca

SEQ ID NO: 30458 - DNA, 20 bp, synthetic construct
  source 1..20: mol_type = other DNA
tgtcagagggatcctaacac

SEQ ID NO: 30459 - DNA, 20 bp, synthetic construct
  source 1..20: mol_type = other DNA
gcaaggtctcaaaaaatggg

SEQ ID NO: 30460 - DNA, 20 bp, synthetic construct
  source 1..20: mol_type = other DNA
gctgtcgacacccagaatca

SEQ ID NO: 30461 - DNA, 20 bp, synthetic construct
  source 1..20: mol_type = other DNA
ggtctctaccaccaaaacgg

SEQ ID NO: 30462 - DNA, 20 bp, synthetic construct
  source 1..20: mol_type = other DNA
cactcttgcagagatgtgcg

SEQ ID NO: 30463 - DNA, 20 bp, synthetic construct
  source 1..20: mol_type = other DNA
ccaggccagcgagcgctcac

SEQ ID NO: 30464 - DNA, 20 bp, synthetic construct
  source 1..20: mol_type = other DNA
cgtcggaagaacagggcggg

SEQ ID NO: 30465 - DNA, 20 bp, synthetic construct
  source 1..20: mol_type = other DNA
ggcagtgcgtcggaagaaca

SEQ ID NO: 30466 - DNA, 20 bp, synthetic construct
  source 1..20: mol_type = other DNA
gaaagctggatactcagtca

SEQ ID NO: 30467 - DNA, 20 bp, synthetic construct
  source 1..20: mol_type = other DNA
acatgatagtgacaggtact

SEQ ID NO: 30468 - DNA, 20 bp, synthetic construct
  source 1..20: mol_type = other DNA
cattgtaacatgatagtgac

SEQ ID NO: 30469 - DNA, 20 bp, synthetic construct
  source 1..20: mol_type = other DNA
cggaagttctgtaggaaagc

SEQ ID NO: 30470 - DNA, 20 bp, synthetic construct
  source 1..20: mol_type = other DNA
ttgcatccgagttcttcccg

SEQ ID NO: 30471 - DNA, 20 bp, synthetic construct
  source 1..20: mol_type = other DNA
ggtcgccccactcccaatgt

SEQ ID NO: 30472 - DNA, 20 bp, synthetic construct
  source 1..20: mol_type = other DNA
tccttactggataagggtcg

SEQ ID NO: 30473 - DNA, 20 bp, synthetic construct
  source 1..20: mol_type = other DNA
ctaatcctcctagctcagga

SEQ ID NO: 30474 - DNA, 20 bp, synthetic construct
  source 1..20: mol_type = other DNA
atcctcctagctcaggaagg

SEQ ID NO: 30475 - DNA, 20 bp, synthetic construct
  source 1..20: mol_type = other DNA
tcctagctcaggaaggaggc

SEQ ID NO: 30476 - DNA, 20 bp, synthetic construct
  source 1..20: mol_type = other DNA
agctcaggaaggaggctggc

SEQ ID NO: 30477 - DNA, 20 bp, synthetic construct
  source 1..20: mol_type = other DNA
cggccgactctacagtgcga

SEQ ID NO: 30478 - DNA, 20 bp, synthetic construct
  source 1..20: mol_type = other DNA
gccccacgtcgcatgcgccc

SEQ ID NO: 30479 - DNA, 20 bp, synthetic construct
  source 1..20: mol_type = other DNA
atgcgccccgggaaagcgtg

SEQ ID NO: 30480 - DNA, 20 bp, synthetic construct
  source 1..20: mol_type = other DNA
cgccccgggaaagcgtgggg

SEQ ID NO: 30481 - DNA, 20 bp, synthetic construct
  source 1..20: mol_type = other DNA
tctctgaagagtagagtgtg

SEQ ID NO: 30482 - DNA, 20 bp, synthetic construct
  source 1..20: mol_type = other DNA
gtaacttgtgcttataactc

SEQ ID NO: 30483 - DNA, 20 bp, synthetic construct
  source 1..20: mol_type = other DNA
actcaggacacttctgaact

SEQ ID NO: 30484 - DNA, 20 bp, synthetic construct
  source 1..20: mol_type = other DNA
cttctgaacttggaccatac

SEQ ID NO: 30485 - DNA, 20 bp, synthetic construct
  source 1..20: mol_type = other DNA
ggaggctgtggtctcagaat

SEQ ID NO: 30486 - DNA, 20 bp, synthetic construct
  source 1..20: mol_type = other DNA
aggctgtggtctcagaatcg

SEQ ID NO: 30487 - DNA, 20 bp, synthetic construct
  source 1..20: mol_type = other DNA
gtctcagaatcggggttttg

SEQ ID NO: 30488 - DNA, 20 bp, synthetic construct
  source 1..20: mol_type = other DNA
gagtttatgttttatccaac

SEQ ID NO: 30489 - DNA, 20 bp, synthetic construct
  source 1..20: mol_type = other DNA
tttctatgagtctagttact

SEQ ID NO: 30490 - DNA, 20 bp, synthetic construct
  source 1..20: mol_type = other DNA
cacggccaggtaaaaagatt

SEQ ID NO: 30491 - DNA, 20 bp, synthetic construct
  source 1..20: mol_type = other DNA
ctggccgtgtggttagtgat

SEQ ID NO: 30492 - DNA, 20 bp, synthetic construct
  source 1..20: mol_type = other DNA
aatctttttacctggccgtg

SEQ ID NO: 30493 - DNA, 20 bp, synthetic construct
  source 1..20: mol_type = other DNA
cccggccgggctgtaagcga

SEQ ID NO: 30494 - DNA, 20 bp, synthetic construct
  source 1..20: mol_type = other DNA
gttctctcctgcgcgaaccg

SEQ ID NO: 30495 - DNA, 20 bp, synthetic construct
  source 1..20: mol_type = other DNA
aatgtgtcaactgcacgatc

SEQ ID NO: 30496 - DNA, 20 bp, synthetic construct
  source 1..20: mol_type = other DNA
gaatcactgcagagtttgta

SEQ ID NO: 30497 - DNA, 20 bp, synthetic construct
  source 1..20: mol_type = other DNA
actgcagagtttgtacggac

SEQ ID NO: 30498 - DNA, 20 bp, synthetic construct
  source 1..20: mol_type = other DNA
acagcagagtttgtacggac

SEQ ID NO: 30499 - DNA, 20 bp, synthetic construct
  source 1..20: mol_type = other DNA
tcaacacagcagagtttgta

SEQ ID NO: 30500 - DNA, 20 bp, synthetic construct
  source 1..20: mol_type = other DNA
cttcaggctcccaaagtcct

SEQ ID NO: 30501 - DNA, 20 bp, synthetic construct
  source 1..20: mol_type = other DNA
agtcctaggattacaagtgt

SEQ ID NO: 30502 - DNA, 20 bp, synthetic construct
  source 1..20: mol_type = other DNA
aggattacaagtgtcggcca

SEQ ID NO: 30503 - DNA, 20 bp, synthetic construct
  source 1..20: mol_type = other DNA
cgcctgtaatcccagcattt

SEQ ID NO: 30504 - DNA, 20 bp, synthetic construct
  source 1..20: mol_type = other DNA
aagcctgccgcaagaggggc

SEQ ID NO: 30505 - DNA, 20 bp, synthetic construct
  source 1..20: mol_type = other DNA
ggtccagtccggctcctgcc

SEQ ID NO: 30506 - DNA, 20 bp, synthetic construct
  source 1..20: mol_type = other DNA
gacccggcccctcttgcggc

SEQ ID NO: 30507 - DNA, 20 bp, synthetic construct
  source 1..20: mol_type = other DNA
aggagccggactggacctca

SEQ ID NO: 30508 - DNA, 20 bp, synthetic construct
  source 1..20: mol_type = other DNA
tttcccagtataaccttagc

SEQ ID NO: 30509 - DNA, 20 bp, synthetic construct
  source 1..20: mol_type = other DNA
ggtctattaattgcttagct

SEQ ID NO: 30510 - DNA, 20 bp, synthetic construct
  source 1..20: mol_type = other DNA
gacgacagcaccagtaatca

SEQ ID NO: 30511 - DNA, 20 bp, synthetic construct
  source 1..20: mol_type = other DNA
tcataggactgctctacatt

SEQ ID NO: 30512 - DNA, 20 bp, synthetic construct
  source 1..20: mol_type = other DNA
agaagtagtacaactcctgc

SEQ ID NO: 30513 - DNA, 20 bp, synthetic construct
  source 1..20: mol_type = other DNA
ctgacaggccgtacaatgcc

SEQ ID NO: 30514 - DNA, 20 bp, synthetic construct
  source 1..20: mol_type = other DNA
tttagcattggagtaggctt

SEQ ID NO: 30515 - DNA, 20 bp, synthetic construct
  source 1..20: mol_type = other DNA
ttaggttatgtacgtagtct

SEQ ID NO: 30516 - DNA, 20 bp, synthetic construct
  source 1..20: mol_type = other DNA
agattgagactagtagggct

SEQ ID NO: 30517 - DNA, 20 bp, synthetic construct
  source 1..20: mol_type = other DNA
gtctcaatctccaacacgta

SEQ ID NO: 30518 - DNA, 20 bp, synthetic construct
  source 1..20: mol_type = other DNA
ctttattgtcacgttctgat

SEQ ID NO: 30519 - DNA, 20 bp, synthetic construct
  source 1..20: mol_type = other DNA
cgttattttcatgttctgat

SEQ ID NO: 30520 - DNA, 20 bp, synthetic construct
  source 1..20: mol_type = other DNA
aaataacgtccaatcagagt

SEQ ID NO: 30521 - DNA, 20 bp, synthetic construct
  source 1..20: mol_type = other DNA
caataaagtccaatcagagt

SEQ ID NO: 30522 - DNA, 20 bp, synthetic construct
  source 1..20: mol_type = other DNA
gcctcgcggtccagacgtgg

SEQ ID NO: 30523 - DNA, 20 bp, synthetic construct
  source 1..20: mol_type = other DNA
ctcgcggtccagacgtggcg

SEQ ID NO: 30524 - DNA, 20 bp, synthetic construct
  source 1..20: mol_type = other DNA
tccagacgtggcgggggtgg

SEQ ID NO: 30525 - DNA, 20 bp, synthetic construct
  source 1..20: mol_type = other DNA
ggtggcggcggcatcccgga

SEQ ID NO: 30526 - DNA, 20 bp, synthetic construct
  source 1..20: mol_type = other DNA
acctgcccttggtgaggact

SEQ ID NO: 30527 - DNA, 20 bp, synthetic construct
  source 1..20: mol_type = other DNA
cttggtgaggactcgggagg

SEQ ID NO: 30528 - DNA, 20 bp, synthetic construct
  source 1..20: mol_type = other DNA
ggtgaggactcgggaggtgg

SEQ ID NO: 30529 - DNA, 20 bp, synthetic construct
  source 1..20: mol_type = other DNA
ggtggagggtggtgccgccg

SEQ ID NO: 30530 - DNA, 20 bp, synthetic construct
  source 1..20: mol_type = other DNA
cttgtctgaatggctccacg

SEQ ID NO: 30531 - DNA, 20 bp, synthetic construct
  source 1..20: mol_type = other DNA
gtattatgtccgcctcttca

SEQ ID NO: 30532 - DNA, 20 bp, synthetic construct
  source 1..20: mol_type = other DNA
gactggagggggagtgggag

SEQ ID NO: 30533 - DNA, 20 bp, synthetic construct
  source 1..20: mol_type = other DNA
gagggggagtgggaggggag

SEQ ID NO: 30534 - DNA, 20 bp, synthetic construct
  source 1..20: mol_type = other DNA
acctccctcctgccccaggt

SEQ ID NO: 30535 - DNA, 20 bp, synthetic construct
  source 1..20: mol_type = other DNA
gaggtcagcatgctagtccc

SEQ ID NO: 30536 - DNA, 20 bp, synthetic construct
  source 1..20: mol_type = other DNA
agcactgtgataactgagcc

SEQ ID NO: 30537 - DNA, 20 bp, synthetic construct
  source 1..20: mol_type = other DNA
tacagtactgtgataactga

SEQ ID NO: 30538 - DNA, 20 bp, synthetic construct
  source 1..20: mol_type = other DNA
cagtgactgacaggctgccc

SEQ ID NO: 30539 - DNA, 20 bp, synthetic construct
  source 1..20: mol_type = other DNA
gtactgtgataactgaagga
